United States Patent Application Publication US 2008/0009041 A1 - sequence listing, part 2

SEQ ID NO: 1 - DNA, 4641433 bp, Escherichia coli W3110 (residues 1,547,146-3,094,290 of 4,641,433)
gtatatgcttttttaataggatagtgaaacaattcgttatccacatctattccgtcagagtgaacttcaaatgcaccaggcgaaagaattgccaggccagtattaagcttaagtgctggggaaaacaaattaaataacatgagctgcatagtagggcaattgttcttcccagaaacatttaaaaaatttaagttttgctctgttttattatggggaataaagttccaatatcggatgtattattagtatcaatgtgggttattttattattgtccagtcttaaacttttgatagatggaagataagtcaggaaatcaagatttatatatttcaactggttgttagcagcgtttaatgtctgaacattgcagaagttgctatagaatattttaatttcagaaagcaaattgttgttaataagtaacgtattcaagttgggaaataagtcattgtgtaaacttgttagtttattatgggatagatccagcagtaagagttcatttttattacctgcaacaatatcagttaattgattatggctgagattcaggtattgcagccattcgcaagattctaattgcacaaactctagttgattatgtgccgcactaaaataagtaactgatgaaagcctatctatatcaatatttctgagagcattattattcatagatatatgtgtaatacttacatttctgccttgaggaaaatttattgactcaagagcattactattcagacttagctttacgagtctatcgtagttggttgcatcaaaatgtgtgaattggttattatcaagattgatagatgtgaagttttgcagccctggtggttgagtggttaaattaagtcctgataaatcaatggtcacttcattagtgtcatcaattatatttcttactgcagtccagtactgcatttgtgcaagtggatcattgttgatgccgttaactaatacatgccaaagatgttttgatgatattagttgatcaatgtcattggttggcagtaaattgttattgcttaagtttaaatattccagttttgtagtgtttttggcgtttaaatgtgcaatatggttgtcgtttaaagtgattgttttcatcctgggatgattgtgtaatataaggtcagtgatcatattgtgatgggcacttaactcaatcagagattcttgccgcgcgagccgttggcttcatcgttatagcctttaaaatcatattcccagtgaccaaaaccaatcatttgatcattgatttgcgtttctcctttaaagccgagacgggcataagttttatcaccatcgtcacgcttatcatcagtaaaataacgtagagcggtaaccttgccataaaggtcgagtttattaccatccttgttatagacttcggcagcgtgtgctacgttcgcagctaacaaaccagttacaaccaccgcaactatttttaatttcatttaacagaatccttttaattatcgttaaacgtattttctaaacgaattttaaacggcgtcatttataaatgacatactgtttttaaaatagaatggtgattaaaaacaatgagaaaaatagatgaaataatattatttatcgatatgtgatcgaagtcgaaatgagatataaggtgaattactggtatttgaaatttatttttttaatattgtcggaatttatctgattaactaccgggccgtagacccggcagttattttaaccacgacgtgtcgccagccagcagagcagggaaccgccgcagaccatcagcgcgccttgccagaacgagaacgacagcggggcgctgagcagcacggctgcaagcgctgaggaaagtacaggcgtaaaatacgaacctaccgccataatggtgacattgccatgcaatataccgacattccatgcagcataagcaaatcctaaggtaaatgccgcagagatgagtttaatcatgacgggcgtgctaaatatcatttctggttgtggcgtaagaaaatagtaaacccacagacttgctcccgttagcaggacaaaaacggtaattccattaaatccgcgtgcgtatttattcgttactgtgcaataggctgcccagataaacgcaccaatgaacgccaggaaataactcaatgggctggtggtgatattattgatgatttcatcataatgtaacccattgtcaccgcctaacacccaacagacgccgacgagggctaataataatccaggtacaatcaaccagttggttttctgaccattaaacagaatggcaaagagaattgtcaggctgggccacagatagttcaccatacccacttcaatcgcctgatgatgggtcgccgcataccctaaggaaagcgccagacagatttcatagctgacgaataacagactcccggcgagtaaatagcctttcgggatttgccgaatacgcggaaatccaaccgtgaagattaacagcagcccgcttaatgaatagatagcagctgcgccgccgaccgggccgagcccctcactgacaccgcgaatcaatcctaccatcgtgctccacaggacgatcgctatcagccctatgagcgttgctttttgtcgtgtcatgctcgctgttttgtctctcttgccgttaaaaattaagctgaattttatagcatttttttaactggcctgtcaggcagtggtgcgtttttctaccgctattgaggtaggtcaatttgcgaaggcggattattttgtggcaaacagatgttctttttgatttcgcgcaaaaagattcagaattttactgttagtttcctcgcgcagtaatacccctgaaaaaagaggaaagcaatggacgtcagtcgcagacaattttttaaaatctgcgcgggcggtatggctggaacaacagtagcggcattgggctttgccccgaagcaagcactggctcaggcgcgaaactacaaattattacgcgctaaagagatccgtaacacctgcacatactgttccgtaggttgcgggctattgatgtatagcctgggtgatggcgcaaaaaacgccagagaagcgatttatcacattgaaggtgacccggatcatccggtaagccgtggtgcgctgtgcccgaaaggggccggtttgctggattacgtcaacagtgaaaaccgtctgcgctacccggaatatcgtgcgccaggttctgacaaatggcagcgcattagctgggaagaagcattctcccgtattgcgaagctgatgaaagctgaccgtgacgctaactttattgaaaagaacgagcagggcgtaacggtaaaccgttggctttctaccggtatgctgtgtgcctccggtgccagcaacgaaaccgggatgctgacccagaaatttgcccgctccctcgggatgctggcggtagacaaccaggcgcgcgtctgacacggaccaacggtagcaagtcttgctccaacatttggtcgcggtgcgatgaccaaccactgggtggatatcaaaaacgctaacgtcgtgatggtgatgggcggtaacgctgctgaagcgcatcccgtcggtttccgctgggcgatggaagcgaaaaacaacaacgacgcaaccttgatcgttgtcgatccccgttttacgcgtaccgcttctgtggcggatatttacgcgcctattcgttccggtacggacattacgttcctgtctggcgttttgcgctacctgatcgaaaacaacaaaatcaacgccgaatacgttaagcattacaccaacgccagcctgctggtgcgtgatgattttgctttcgaagacggtctgttcagcggctacgacgctgaaaaacgtcaatacgataaatcgtcctggaactatcagctcgatgaaaacggctatgcgaaacgcgatgaaacactgactcatccgcgctgtgtgtggaacctgctgaaagagcacgtttcccgctacacgccggacgtcgttgaaaacatctgcggtacgccaaaagccgacttcctgaaagtgtgtgaagtgctggcctccaccagcgcaccggatcgcacaaccaccttcctgtacgcgctgggctggacgcagcacactgtgggtgcgcagaacatccgtactatggcgatgatccagttgctgctcggtaacatgggtatggccggtggcggcgtgaacgcattgcgtggtcactccaacattcagggcttgactgacttaggcctgctctctaccagcctgccaggttatctgacgctgccgtcagaaaaacaggttgatttgcagtcgtatctggaagcgaacacgccgaaagcgacgctggctgatcaggtgaactactggagcaactatccgaagttcttcgttagcctgatgaaatctttctatggcgatgccgcgcagaaagagaacaactggggctatgactggctgccgaagtgggaccagacctacgacgtcatcaagtatttcaacatgatggatgaaggcaaagtcaccggttatttctgccagggctttaacccggttgcgtccttcccggacaaaaacaaagtggtgagctgcctgagcaagctgaagtacatggtggttatcgatccgctggtgactgaaacctctaccttctggcagaaccacggtgagtcgaacgatgtcgatccggcgtctattcagactgaagtattccgtctgccttcgacctgctttgctgaagaagatggttctatcgctaactccggtcgctggttgcagtggcactggaaaggtcaggacgcgccgggcgaagcgcgtaacgacggtgaaattctggcgggtatctaccatcatctgcgcgagctgtaccagtccgaaggtggtaaaggcgtagaaccgctgatgaagatgagctggaactacaagcagccgcacgaaccgcaatctgacgaagtggctaaagagaacaacggctacgcgctggaagatctctatgacgctaatggcgtgcttattgcgaagaaaggtcagttgctgagtagctttgcgcatctgcgtgatgacggtacaaccgcatcttcttgctggatctacaccggtagctggacagagcagggcaaccagatggctaaccgcgataactccgacccgtccggtctggggaatacgctgggatgggcctgggcgtggccgctcaaccgtcgcgtgctgtacaaccgtgcttcggcggatatcaacggtaaaccgtgggatccgaaacggatgctgatccagtggaacggcagcaagtggacgggtaacgatattcctgacttcggcaatgccgcaccgggtacgccaaccgggccgtttatcatgcagccggaagggatgggacgcctgtttgccatcaacaaaatggcggaaggtccgttcccggaacactacgagccgattgaaacgccgctgggcactaacccgctgcatccgaacgtggtgtctaacccggttgttcgtctgtatgaacaagacgcgctgcggatgggtaaaaaagagcagttcccgtatgtgggtacgacctatcgtctgaccgagcacttccacacctggaccaagcacgcattgctcaacgcaattgctcagccggaacagtttgtggaaatcagcgaaacgctggcggcggcgaaaggcattaataatggcgatcgtgtcactgtctccagcaagcgtggctttatccgcgcggtggctgtggtaacgcgtcgtctgaaaccgctgaatgtaaatggtcagcaggttgaaacggtgggtattccaatccactggggctttgagggtgtcgcgcgtaaaggttatatcgctaacactctgacgccgaatgtcggtgatgcaaactcgcaaacgccggaatataaagcgttcttagtcaacatcgagaaggcgtaagggggcgaacagatggctatggaaacgcaggacattatcaaaaggtccgcaactaactccatcacgccgccttctcaggtgcgtgattacaaagcagaagtcgcaaaacttatcgacgtttccacctgtatcggctgtaaagcctgtcaggtggcgtgttcggagtggaacgacatccgtgatgaagtggggcactgcgtcggggtttacgataaccccgccgatctgagcgccaagtcctggacggtgatgcgctttagcgaaaccgaacagaacggcaagctggagtggctgatccgtaaagacggctgtatgcactgtgaagatcccggctgcctgaaggcgtgcccgtctgctggtgcaatcattcagtacgctaacgggattgtcgatttccagtcggaaaactgcatcggctgtggttactgcattgccgggtgtccgtttaatattccgcgcctcaacaaagaggataaccgggtatataaatgcacgctctgcgtcgatcgcgtcagcgtcggccaggaaccggcttgtgtgaaaacctgtccgaccggggctatccacttcggcaccaagaaggagatgctggagctggcggaacagcgcgtggcgaaactgaaagcgcgtggttacgaacatgctggcgtctacaacccggaaggggtcggtggtacgcacgttatgtacgtgctgcatcacgccgatcagccggagctgtatcacggtctgccgaaagatccgaagatcgacacctcggtaagcctgtggaaaggcgcgttgaaaccgctggcagcggctggctttattgccacttttgccgggttgattttccactacatcggtattggcccgaataaggaagtggacgatgacgaggaggatcatcatgagtaagtcgaaaatgattgtgcgcaccaaatttattgatcgcgcctgtcactggaccgtggtgatttgcttcttcctggtggcgctgtccgggatttcgttcttcttcccgacgctgcaatggctgacgcaaaccttcggtacgccgcagatgggacgcattttgcacccgttcttcggcattgcgattttcgtcgcactgatgtttatgtttgtgcgttttgtgcatcacaacatcccggataagaaagatattccgtggctgttgaacattgtcgaagtattgaaaggcaatgagcataaagtggcggatgtcggtaagtacaacgccgggcaaaagatgatgttctggtcgatcatgagcatgattttcgtgctgctggtgaccggggtgattatctggcgtccgtactttgcgcagtacttcccgatgcaggttgttcgctacagcctgctgatccacgcggctgcgggtatcatcctgatccacgccatcctgatccatatgtatatggcattttgggtgaaaggatcgattaaagggatgatcgaagggaaggtaagtcgtcgctgggcgaagaaacaccatccgcgctggtatcgtgaaatcgagaaggcagaagcgaaaaaagagagtgaagaagggatataatctcttttgaactttaagctgaaaatggcgctgtaaaaggcgccattttcatattgtagacaacgtaggctttgttcatgccggatgcggcgtgaacgccttatccggcatgaaaacccttcaaatccaatagattgcagtgaacgtgtaggcctgataagcgtagcgcatcaggcaatgttgcgtttgtcatcagtttcaaatggcgctgtaaaaggcgtcattttcatattgtagacaacgtaggctttgttcatgccggatgcggcgtgaacgccttatccggcatgaaaacccttcaaatccaatagattgcagtgaacgtgtaggcctgataagcgtagcgcatcaggcaatgttgcgtttgtcatcagttctaaatggcgctttataaagtgccatttttttattgcgtaaccagacggcgtaatcgcgacacatccactgttttttctgcctctgccagactccaggcgttttgcagattcagccacatttgcggcgaactgccgatcaccacggaaagtttaatcgccatttctggcgtcaaagctgcttttcctgtcagcaatcggcttgccgttgagggagcaatttccattgctctggcaaactcgcgcaggctgacattaagttcgtccagtgattcctgaataatgtcccccgggcggggatgattggccattttcattagtgtctttactctcagtagcgttccttcactgggaacactatcattattgttccttcctacgcaacaataatccatttagccatttcatgttggagagtgtgcgatgctgcgacccgaacatggcagtcgcagcaaaggcctcttagtgacggaaatcaatcaccatgcggccacggattttgccttcttccatctcagtaaagatggtgttgatgtccgctaacggacgcagggcgactttcggcaccactttaccttcggcggcaaactggaaggcttcagttaaatcctggcgcgtgccgaccagcgaaccgaccacttcaataccatccagcacaagacgtgggatatccaggctcatagactccggcggtagaccgacagccacaacacgaccgcctgcacggacagcatcaactgccgagttaaacgcagctttagctaccgctgttaccaccgcagcgtgagcgccaccagttttctcctgcacaattttggcggcgtcttcggtgtgtgagttaatcgctaaatctgcgcccatttcggttgccagttttaactgctcatcattgacatcaatggcgatcactttggcgttaaagacattcttcgcgtattgcagggcgaggttacccagaccgccaagaccgtagatagcaatccactgccctggacgaatttttgacagcttaacggctttgtaggtggtgactcccgcacaggtaatgctgctggccgccgccgagtccagaccatctggcacttttaccgcgtaatcggcgaccacgatgcactcttccgccatcccgccatcaacgctgtatccggcatttttaactgaacggcagagcgtttcgttaccactgttacagtattcgcaatgaccgcatccttcgtagaaccacgccacgctggcacgatcgcctggttttaatgaggtgacacctggacccacttctgccaccacaccgatgccttcatggcccagaattacgccggttttgtcaccaaaatcgccattcttaacatgaagatcggtatgacatacaccacaacactccattttcagcagggcttcgccatgtttcagtgagcgcagtgttttatacgtaacgtcaacatgatgatccttcgtaacaactgcagccttcatagttcctccttttcggatgatgttctgcatagcaggtgaggcaaatgagatttattcgccactacccagtatggatgagatctgaaaaagggagagggaaatagcccggtagccttcactaccgggcgcaggcttagatggaggtacggcggtagtcgcggtattcggcttgccagaaattatcgtcaatggcctgttgcagggcttcggcagaggttttcaccgccacgccttgctgctgcgccattttgccaaccgcaaacgcaattgcgcgggagactttctgaatatctttcagttccggcagtaccataccttcgccgttcagcaccaatggtgaatactgcgccagcgtttcacttgccgacatcagcatctcatcggtgatacgtgacgcgccggaagcaataacacccaggccgatgcccgggaaaataaaggcgttgttacactgggcgatagggtagattttatctttccataccactggattaaacgggctgcccgtggcgaccagcgcgttaccttcggtccaggcgataatgtcctgcggtgtggcttccacgcgtgacgtcgggttagacagcggcatcacgatcggacgcggacagtgtttatgcatctcacggatgatctcttccgtaaacagcccggtctgtcctgagacgccaatcagaatatctggttttacattgcgcaccacatccagcagtgacagcacatcgctgtcggtatcccagtcactgaggttttcgcgcttctgcaccagtttggtctggaaaggcagcaggttcggcatcttgtcagtcagcaagccaaagcgatcgaccataaagactttctgccgcgccgcttcctcgcttaatccttcgcgctgggtctgggagatgatcatttcggcaatgccgcatcccgctgaacctgcgccaaggaagacgatttttttctcgcttaactgaccacctgccgcgcggcttgctgcgatcagtgtgccgactgttaccgccgcagtgccctgaatgtcatcgttaaaagaacaaatttcattgcgatagcggttaagtaacggcatcgcatttttttgagcaaagtcttcaaactgcaacagcacgtctggccagcgttgtttcacagcctggataaattcatcaacgaattcatagtattcgtcgtcagtgatacgcggattacgccagcccatatacagcggatcgttaagcagctgttggttgttcgttccgacatccagcaccaccggaagggtatacgccgggctgatgccgccacaggcggtatagagcgacagtttaccgatcggaatgcccatcccgccgatgccctggtcaccaagccccagaatgcgttcaccgtcagtcaccacaatcactttaatattatggttcggcacgttttgcagaatatcgtccatattgtgccggttctggtaagagataaacacgccgcgtgaacggcggtagatctcagaaaaacgctcacaggctgcgccgacggttggggtataaataacaggcatcatctcatcaagatgattgtttaccagacggtagaagagggtttcgttagtgtcctggatgttacgcaggtagatgtgtttgtcgatttcggttttgaatccctgatactggatccatgctcgttccgcttgttcttcgatggtttcgaccacttccggcagtaaccccagcaggttgaagttacggcgttcttccatgctgaaggcactgcctttattcaacaacggaaattccagcagtacagggccagcgtaagggatataaagcgaacgctgtttttttgtttttggttccatgtcactcactcttttttgaatatccatccctggggggcttttatcgtctttgctttaccgccagggcgtcggcctcaagtataaagcagataaaaacaaaaacaccattgcgcaggcaatggtgtttaatcgtcattgaggactgatggttatgaattacttttcagcggggcgttttctgccggttgggttatttactacgctggatttgtcaccttcggtaactattttgcgctggttagaaattttatggtccagtccaagaatatgacgtgcctgacggttcgatttcattttaactcctcaatcctgtagctagttttaaggacaacatcgccgtagcgaagaaacacgtgctaaacccctaaattaggttgccgatcaagcatagcaccttaaagcgtagggtgctggccactgaccacataattgatcgtttgctggtagatatcactgaggatgtcgttatcagaagcttcaacccatttggtcagctccatgagaatgtcatcttcagtgacaacaccatgctgtgcccgaaggccttgctcaatggcattaaccagagcgggttctgctgttgaattttctgcctgataataagtaaacatagtgattctccgtgtctgtgtatttatggtgtctgctacggatcgcagatttataaagcacattcagcatggcaaatatttgccgcttcgttgttaagattagtcctggttgatgatttttatattttaacaccatgatattcatagggattgtgattggtatgatccgattaatattgatacaatatcttttgggttatatattcccggtaatctattgtgggaatttaatttaagtgcagaagtaatattttcgccggattttattcggaatatcctgcttatcctcgtgctgtttctcacgtagtctataatttcctttttaagcccacaggagagcaacaatgacaatccataagaaaggtcaggcacactgggaaggcgatatcaaacgcgggaagggaacagtatccaccgagagtggcgtgctgaaccaacagccgtatggatttaacacgcgttttgaaggcgaaaaaggaaccaaccctgaagaactgattggcgcagcgcatgccgcatgtttctcaatggcgctttcattaatgctgggggaagcgggattcacgccaacatcgattgataccaccgccgatgtgtcgctggataaagtggatgccggttttgcgattacgaaaatcgcactgaagagtgaagttgcggtgccgggtattgatgcctctacctttgacggcataatccagaaagcaaaagcaggatgcccggtctctcaggtactgaaagcggaaattacgctggattaccagttgaaatcgtaaagcattgccggatgacgcgtcaggcgcgtgaatgcctgatgcgttgttagcatctctacagcgcccgccagcaccggagctcacgtccgtcctcccttattgctaatgattgccggacttcacatccgtgggttgccagcgggcaacgttcgtagaaaaaacagccttgcggcaacgtgcggtttcccggcagatccgttttacgtaatgcccattcttcctccagcggtttatcaatggcggggagggaatccagcaataatcgggtgtatggatgtgcaggtgccgtcagcacctgctgcgcgtcgcccagttctacaatctgcccgagatacatcaccgccacccgatcgctcatatgacgtatcaccgagacattgtgtgaaatcagcacataggtcagcccgtgattttcctgtagcgttaccagtaaattgaggatctgcgcctgaacggagatatccagcgcagaggttggctcatcaagcacaatcacgtcaggctgcgaagagagtgctctggcaatggcgatacgttgccgctgcccgccggagaacgcatgaggcaggcggtcgagatactccggacgaatacccacctgcacagccaactcctctgccaacgctcgccgctgttgttcactactacgcttagctatccagagcggttctgtgatgatgcgccacaccggtaagcgcggattaagcgaagagagcgggtcctgaaacaccatctgcataatgcgttgtgagccagaacggatgtactgcccgtggctcggttgcagcatacccattaaaagctgtgcgagggtgcttttgccgcagcctgactcgccgacgatccctaaggtttcaccacggcggatctgtaaatcaataccattaatggcatgaacatgttccgtagttttaccaagccagtttttacgggccgggaaattgatatggacgtcgcgtaacgttaataacgtgtcagacacttataacctcctgctgcggataccaacaggcacagcgctggttgttgtcaccacacgctgtcagcgccgggacgttttcacactgtgcacctgccgcatagcaacgatcgcgaaaagcgcagccgtcaggcaaatgggtgaggtttggtaccgtccctggaatggcgggtaatagctggcgtggtactccatgttctggtgcgcattgcagcaaaccaatggtatacggatgccggggatgatggataacgtctgccgtcacgccgctttcaattacgcttccggcatacatcacgtaaacgctatcgcacagttgcgacaccacggccatatcatggctgatgaacagaaccgcagttccactggcgcgggctttatgtttaagcaaacgcagtacctgcaactgcaccgtgacgtccagcgccgtagtcggttcgtcggcaataatcaattgcggctcgcaggagaatgccagcgcaatcattacccgctggcgcataccacctgaaagctcaaacggatagcgcgacataacttccacggcatccgggatttgcatctcttccagcaggtcaatcgctttagctctggcttcccgacgacttattggttgatgatggcggatcacgtccatcatctgaagacctattcgacgtgtcggattgagggcggtcatcggttcctgaaagatcatcgccactcgtgcgccgcgccactgacgaagctgtttttcccgcgcgttaagaacatcttctcccagcagggaaatctgcccccgatgtacgcaataactgcccgtcggtagcagacgcataatcagcattgcggtgactgatttacctgagccggattctcccaccagaccgacaatttcaccgcggttaatctgcaaggacacattgttgagcgcgtgaacatcaccgttaaaaccggggaaactcaaatgcagttgttgaatgtccagaacgggttgggtcatgactgctttcctcctgctttcgggtcaagcagatcgcgaataccatcaccaaagagattaaacccgacggcggtaagcaaaatcgctgcccccggaaatgcgcaataccaccactgatcgagtacatagttgcgaccatttgctaccatcgcgccccattcagcactcggttgttgagcacccaggccaataaatcccaacgtggcggccattaaaatcgcgctaccgatatccagcgatgcctgcacgatcagcggcggtagggagttacgtaaaatatgccagttgatcagatgccaacgagacgcgccaaaggttttcgccgcctgaacataggtatactggcgtacaactaatgcttgcccccgcgccaggcgcacataaaagggaattcgcacaatagcaatagccagcatggcgttaaacaaactcggcccgagagcggcagccagtgccattgtcagtaccaacgaaggaatcgacagcataatgtccatgatgcgcatgatgatggcgtctgcgcgtccaccaagcacaccggatagacatccgagtagcgaaccaatcatacccgcaatggcaaccacgactaatccggcgagaattgattgctgactgccgaccagtacgcggctaaacagatcgcgtcccacttcatcggtgccaaaccagtgcgccgcagaaggcggcaaaaggcgggcggttaaatcaatggcgttgggatcatgcgtcgccagccacggtgaaaaaatcatcatcaatagcattaatacaatgatgactgcgctggtcacggtgagcggactgcctttcagcatccataccagttttgcaccgttaaatcgcgtttgtttttgtgggcgtacggcggacgtttcctcgcttagcatcattcaccacctccacgtccgatacgcggatcaatccacaaatagagcaaatccaccaccaggttgaccagcacataagcaaatgaaaccacgacggcaaagcccatcactgccgggaagtcgagcgcctgtattgatgttactacccatgcacccattccgggccaggcaaaaacggtttcggtgagcactgcgccatacaacaaatcgcccagcgccaaacccaatacggtaatcgatgggatcaacgcattgggtagcgcataacataaaacgatataccagccgggcaagccgctggcccgggcggtacgaatgtagtcttcactcaattgttccagcatcgctgagcggatctggcgagcgacaattcccaggtgaacgaacgccagcgttaatgccggtaagatgagatgttgcaacgcattgaagaagacttcaccgttgccttcaagcagcgcatcgagcagataaaagccggtaacgtgcgttggtggatccagccagtcatcaagccttccgccgccgggaagaatttgcagatgaccataaaacagcacaatgacgcccagcccaagccagaacgcaggtgtggagattccggtaatggccattattcgcaccagatgatccagccagcgatttcgccagactgcagagagtatgcccagcgggatgccaatcaggagtgccagcagcagggcaccaaaagccagctccagcgtcgccgggaaaaatatacgcaactcttccagcaccggacgcccggtacgaatggatgttcccaggtcaccatgaaacaggtcgctgacgtagcggtaaaactgtacatacagtggctggtccagtcccagttgctggcgaatattttccacgatagcatcgctggcgcggtcacccgccagtaaccgcgccggatcaccagggatcagatgcgagataataaacgtaatcacgcagacgcccgccaccacgagcaccagcccccagcagcgttggcgtaaaatactccagaaggtcacgttatttactcatggtattgatattgaagacctgttccagcatgggattgaacacaaagcctttcacctctttgttcatcgccagttggtagtttttctggaacaggtacacataagcagcgtcatcaatgacgattttctgtgcctgctggtagtcccgggtacgctgcgtctggtcggtggtcgcaagcgcattgcgcagtaacttatcgacctcactgttttcatagaacgagcggttacccggcagaccttttttgtctgactcaaaccagtaattcataaacatatacgggtcggcaaaatccggactccagttgccaatcgcaatgtcgtaatcacctttacccactctgtcgcgcatggtggcgttcgccagcttttccagcttcacaatgatgcccagcttgttgagactggattgtgtcgccagagcaataggctcccagttcggatcgttatcggagtagagaaacgtcaggctggtgggtttgctcgtcactttatcccattcggctttggctttcgtttcgtcatggttgtattgcattgccgtcgcatcgtagccccacatgccttccggaatcgggccgcgcatctgttttccgttaccactcagaatgccgttaaccatgccctgataatcggtagaccaggaaatggcccgacgcagatccgcctgattaagaggcgctttgctgttattcagatacagataggtaacgcgcagtgacggatactctgccacattgactttattttcctgcttcagggcgttgagttgatccaccggcagcgcatcggcaatgtcaatgtcgccacgggagagctgcaggcgacgggaggcactttcaccaataatttttaccgatacccgtttgaagttcggtttattgcctgggtaatgcggatttggcaccagaactaattgctgacctttttgccagcttttcagcataaatggtccggaaccggcggtattttgcgcgaggaagccgcgagcatcatccgctgcatgttcctttaagaccgccggattgataatggatgcaccgtcattcgccagcgtgtagaggaacggtgcgaatggttggctaagggtaaacttcaccgtatgttcgtcgggagcatcaatctttaaatctttgggaaatgcttctgctggcccctggccgatttttagtagccgctcaaaagaaagttttactgcttcggcagtgacaggtgtgccatcggcaaatttagcattatctttcagggtgaacgtccactctttttgatcgtcagacgctttccagctacttgccagatcgccttcaacgtcggttgagcctttatcaccgtccgttttgtactgaaccagccgctgataagacgggtaggtcactgtccagtcgttattatctattgttaccgccgggtcgagggtttgtggatcggcggccttaccaatcaccagcatatcttttggtacggcggcgtgcgcaaccgggaaatttgtggcaaggacgagcgcgagcaatgtgggacgaaacgatatcgatctcttcatgacagtttcctgattaactgacgtgctgtgtgccaggggatataaaacaagagaattgatcagcgagcagagggtaactcgctgcctggggtaattcgaagtgccaccattcgctggagataccgacaaaaccgccaccagtcattatcgcattcagcaacagccgattgcgctgagcggcgggcgggacggaagggtgataggcatgggagcgctcgtgcatttcatcgaaccctgcgcccatatcgaggatgttcccgtgctcatcacgaagcgtcaggtcgatcgccgtgccacggctgtgattagaaccgaccgtcacatcaacaacatattgcgggtctgggcaggcttgccacaacatcgcctgtgcttgttgtgggcgatacgcatcgtaaatcaccagttgtaaccctgacagctgggcgatgctgatacttttcgccagcgcggtaatcgcatccttgtgtaacagacaacgcgcttgctgataaatagctttacctgtgatgttatcagcgcaggcgtatttcaattcgatctccagatcagggaagattacggctaaatcaaccagttcggtggtatccgacataaacggttcctgtataagacaaaaattgctgcgctttccgcttatgcagatctcatgccatgccgggataagcgccagaatgctggcttaaagttatattttttaacttttgatcaacatttgtgcagcgtagtgcagttttggtgcaagaggggaagttaaggaaggaatctcccggaatcgtagctgaaatcacagtatttaagtgacagtgtcacgttaaatgaaaacccgcgagtgcgggcgagaggaatttgtcagattttcagcggtaacacgctgctcatccagcctggaatttcttcggcgggtagggggcgggaaaagaaatatccctgaataacgcgacagtggatcttgcgtagcatctcaaattgctctttggtttcgacgccttccgccacgacggttaaattgaggctttgcccaatgctggtaatggcttcaagtaaggcaaggatgcgtttttcggtcagacaacgatcgacaaaacttttgtcaattttgatttccgttaccggaagactgactaagcgggataatccggaaaagcccgtaccaaaatcatctaccgataagcccacgcccatatcacgcaggatctgaatgcgcttaaagatttcggtatcgtgttccatcatcatgctttccgtgatttctaccgtcagctggtggccgtcaataccccaggcgtgcattgcatcagacacctgattaggcagttgattactgcgaaagtgcagcgccgacaagttcacggataacgccgggatatgaatattctggctacgccattctgctaactgacggcaagcttccgcgatgacccagcgcccaatattttcgatttcaccaatctcttctgcgagaggaataaaccgtgaagggggcacatgaccatgcaggggatcgtgccagcgagcaagggcttcgatgccgtacagttcacccgtttctgcgaagatttgcggctggtaaaccagtttcagttggttattgctaatcgcttctttcagcgctgcgcctaaaaccaaacgctcttttaccatttcgttcatcgccgggctgaagaactgccagccgttaccgccattcttgcgaatataatccattgcattgtgagcagtggagagcaagtaatcgcggtttttacccaggtcgtagctgatgccaatactcaaggtaagcgggaagggtttatcgtcaatcattatcggcttgctgaccacattccgtagctcatcggcgatttgggtaatgttactgacgtcgttttcgaggctcacgaggacaaactgcgtaccttcgatacgacagagatactgatccggtttgagtttttcacgaaagcgattgaccacttccagcaatgcctgatcggcccacgcatagccaaggctatcaatcacatcctgaatatggtcaacaccgatgagatacaccacgggagagacggctttgtcgaccaggtcatcgaggtaattgtgcaggttattgcgatttggcagaccggtcatcggatcaaattggatgagttgttcaatatgctgacggcttttttcctgttccagcgccagcgcggccatatgctggctgatatctgccacgcgttcgataaaggcgctggtttctgctcctgacgaggttttaatttgcaggatccccgcaggcgcgccatcacgctgacgaatggtcgctgaccagctttgcgcattttgaatttctgcaccgtgggaagatgacgcccagtgtatcggcatcccgttgcgcagtgcgaacagcgaaacatgcgattcgttgagtacagattcgatgttacgacaaatgatttcccccatttcatgaaatggcgggctgctgcacatggcggcgagaatattgccttcaagctggcgaatctgccgttcttcggtgatatccgagaaagtcattaccaggttctgcagatgcgcgagcacgtcataaaccgggctgatagaggctttaatccagattttttcaccggtgcgcgtcaacagcagaaattcgtcctgatcgcgggcggttttccatagcaactgttgtaaacgaatgcggttatcggcagggaattcaggaatgttcaggagtgtatcgggctgcataccgctggcttcgctaatgcagtaaccaaacatttcggtaaatgcgcgattgcactgcacaatatggcgttccggatcgaggacaatcaccggtcggtcgagatggtcaacggcaataatcaattgtcgggtctgttctttttgcgccatttctacgctggcatcccgtaccagcgccaggtaataaactttcccctcggcgctcactttcgatagcgcaaaacgggtccagattttactgccgtcttttttctccagctgcagctcccgactcatcccctcaacacgcgctttaccgccttcacggttgtgacgaatgtattcaggatgcgcaggacgcaaatcccgcggaatcagcatatcaatgttattgccaatgacttcttcacgtttgtatccccagagcttctctgcggcggggttgaaaaacatcacttcatcattttcgttaattaacaccgcacccatcatattttgctcaagggcggggaaaaaaatgccatcggcggcattatccgcatcggttagcttcatgattacctctgcatcctggcgcatctaaagactggctttccagagttcaacacggtttctacctcgtcttttggcgatatacagagcttcatcggctatttgaatgaggcgctcatagtcaggatgaccattaaacatggcggcaccgatggaaagtgagagggcaatatcttcgccgtttgcggctttcagtttggttttctccacccgactgcgaatacgttctgcggtacgtaacgtttcgttttcagaagcttcagtcaaaacaatgataaattcatcgcccccgtagcggaaaacataatcactactgcggacgttgtcataaaaggcctgagagactttacgcagaatttcatcaccagtgttatggccccacgtatcgttgatctctttgaatttatcaacgtcaataatcagcactgacagcggtgtaccggtccggttggcatgggcaatttcgcgtttgaagatagtcggtaggaaacggcggttaagtaatttcgtcagtacatccataccgacttcgtggcgcgatacttcttcaaacaattcacgcagcaaggtaataatttgcgatacggtatttcttatctgtaataaaaatttcacccgcagacttctgttattcaaatttctggtgttacgcatggtttgattgaaaataccgtcgaaatcctgaatcagacgggagatatggcctacttcggcaataccactaaaataatgtcgacctttatggttaaaccacaggccaaaatcagcctggcttaaaggcaaactactgcctaaatcagaatccagcaggattttatagataatatctatttcccatgaaagtattgaggctatttgccgttctttttcttcttcggcgttttccagtaacgagaagatacgatagttttcatcttcctttgaggcactactgtcactaaaggtaaacgcgcgagtcatcacttccatcgcgatatcaatactgttaatcgagaaatggtagacctgaagtttttctgcggcggaataatccgaagagaagatcaccggatagaggatttttttcagcacccgaaaccccatctcgacaatttctaccggaattcctatgcgggcatgcacttccgcgacggtatgctggatttgtattagcctttcgacatcgtcaacctgggcagaaagcacgttaataatccagcgttccatcgcactcttcaactgccgctcaacttgttcattactcaagaattcttcggcatgcgggtcgatgcggacaattcgataaaactcgatactcagataatgagcatgcgcaacggcaatttccgcggctttagcacgaatgggcggatctgcctgttcgacaagtccggtccactcatctttcattcttttaaaatacatctccataattcacacccttataaggctgggaaatcagacggaatcaaaatgaaacgcaacgtgcgagatcgactaactgcaccatattctcctgaaatatgaagatatactgaaaagaaataagcgatttaggacagtttcaatctacgctactgttcttcagaagagtatagcccatcgtaattatttttcggtgacagcgaatatcgtatggtttttcatattcatacatttttattagggatttatggctgtttaactaagtgtggttaatttgacttaagtaagcatgattattagtgggatagtttaagagggtaacaagccggtgggtaaagcaccggcttgttacaaagtaagaatgggagtttaactgccccagcgactttgcagatagctgaccgcttgttgagtctgcggtttattcagatagtcctcacggaacaagatggtgccgctaatttcgggcacagcatcgttaagatcgagctgctttttcagttccggtacgccgccgttaatcatccagtctggctctatctttgaaggttcacccactttatagaaggcgataccgatatacaggcgggtcctggtcggtttaacgacatccgcccaccattttgccaacacgtcataacgcgcggcactccgtgagaacggccagtaaatttggggagcaatgtaatccagcaatccttgttccacccatcgacgggtgtcagcgtaggattcgtcataggctgccgcgcctcgggtatcggaaccgagcggatcgtgtgatcggttacgccacacgcctgccgggctaacaccaaattcgactcccggcttaatgcttttaatggtgtgcgatacctttgcaattaactgctgagtattgttgcgccgccagtctgcttttgacgcaaatgcgcctccgtatttacggtacgtttcgttatcatttagccgtgaacccggtgactccgtatagaaatagtcgtcaaactgcacgccatctacgggatagcgggaaaccacttctgcgactattgatgtgatccagtcctgaacctcagggatgcccgggtcgaggacaaagcgatcgccagacgttctgatccagtcgcggtgttgcacatagacgctcgccggttgttgagacagagtgctattcagttccctgatagtaccgggcttcgtattaaccgatacgcgataggggttaaaccaggcgtgtactttcatcccacgcttgtgggcttcgtcgagcataaattgcagcggatcgtaacccggattttcaccaatcttaccggtcataagatcggaccacggcaaaattttcgatggccacagggcggtaccgtccggcttgacctggaaaaagaccgtgtttatgccgagacgttgcagatgatccagtttgtcgatcatcgcctgttgttgtacacgggcccggctggtggggttactaatgttaaccgaggaaaccggtggccagtcgagccgagaaaccgtggccagccagatgccacgcatcggttgtgacgattgttgcgtcgtggctggtggctttgaacctgctggtggtgtcaccatggactctggaggcgtgcttttacaactacacagtaaaagtgccagtgcaactagtatcgctggtcttctaatcgttaatttcttgtttcgggagcagatatccatatgtgctggtttccggtaaacagatgtgcgctcattctcgtacttatccccgttaagtcaatacgacagcaagcacgaaaaagggagcgatgaattatcgctcccttgtcttataaccattcagacatggttagtgtttcttgtcattcatcacaatatagtgtggtgaacgtgcacgcgggtgcaggaagaagtgaccttttggtgcgttctgactgttgattggctccagagtgacgccggtatttgctttgcctttacgatcatgaacagcatagagaataaagggcagggcaagtaccaccaggaaactaacaaccagtaattcaacatacatatcggtagaatcaccctggatgttatccggcggcaggaaggaaacaataaacgccataattgaagtcagcagaccgacaattgccacgaccagtttcacccctttaccaccagggatattaaatgtgcgttttaagtcaggatgtttaagaaccaacacaatgtagccaataaacagcatgaaataagcacacagataaatcaccaccgtcagcgccagtgcgatcaggaaggacatgttgttaccgccaccggtattggtgaggatgatcaacgcgatagacgtaatcaccagctgcgaaatgaccagcgttaccggtacgccatttttgttcattttagcgaatgccgctggcagcaggtttttctgcgctgttacatacatcccgcgagaaggaccaacaatccaggaggcgatttccgccagaacacccagcaacagcagtgcggagatcacgcgaaccgtccactcaatttctggtgccacatgggacatcagaacggtaaaggtttgcattacccctgcggagaggttgatttcattacccggaatgaccatcgcaatagacaaaccaccaacagagcttaagcagattgccgccaccatcagcagtaacatagccaacggatagtcgcgccctgggttgctcatttcattgacgtgggttgcggatgcttctacgcccatataactcaaaatgaaggcaacaaatactaccagggtgcccactttagagaagtcagggaagaaggtcttcgaatccatttcgatagcaacgggggcaccggagtgcagataaatagccgctaatgcgatcaaaataaatgcaggtaacaggataccggcgaagaagccaactttagcaattcgcgccgtgtatttcgtgccaccaaactgcgttaatgccagcgcccaaagaatgatgagtgctgcaatagttttggtaatggggtcttcattcagcgctggccatttcaggatgtaggagagtgcccctaacacgaaatagagcatcggaataaaaccaatggcgatttgcagatagccaaatgagatcgctgcaaatccccatctcggccccagagtatttgatacccaggcgaagacaccaccttcttcccagccgtcgacggtggccatttccgcagcacaaagtcccacgggaataaaccataaaatcccgcctaatagcaggaagaagactaatgaaaagcccgatgttgcgaaggtagggtattcataaacagccattaccatcgatgccgttatggcaaagaatccaagtaatgtgagctgcttagctttacctgtctgtactgatgtagccatattatccccctaaaacggtattcctgtcggaaccgcacctgttttgttctgaagcgtattcagaacaatattttccgttgctaatgccagtgaacagactttggaaattgtcccgaaacgggttcgtttcgggacaccgttaccgttaaacgttatcaggtatgtttaaagctgttctgttgggcaataccctgcagtttcgggtgatcgctgagatatttcagggaggctttgtagtcttccagcaacagttcagcaaagtccatttcgaagccgcgacgacacataatgcgcatcaccacgatgtcggtggcttcaccgccgagagtgaaggccggaacctgccagccgcgcagacgcagacgttcagagaggtcatacagggtgtatcccggatcttcaccatctttcagtttgaagcaaaccgccgggatgccttcgtccgggcgacccgtacagatgaactcatacggccccagtttggcgatttcatccgccagataagcggcaacctggtaagaggcgttctgtactttggtatagccttcacgaccgaggcgcaggaattcatagtactgtgcaattacctgacccgccgggcgggagaagttgatggcaaaagtaccaatttgaccacccaggtagtcaacgttgaacaccagttcctgcggcagcgcttcttcgtcacgccagataacccagccgcagcccagcggagccagaccgaatttatggcctgaagcactgatcgatttcacacgcggcaggcggaagtcccagacgatatccggggcgacgaacggtgccaggaagccaccgctggcagcgtcgatgtgcatgtcgatgtcgataccggtatcggcctggaatttatccagcgcatcgtgcagcggttgtgggaactcatagttaccagtgtaggtcacgccgaaagtcggcaccacgccgatggtgttttcgtcacaggcttcaatcatgcgtttcgggtccataaacaactgaccggggcgcatagggatctcacgcagctccacatcccagtagcgggcgaatttatgccagcagatttgtaccggaccgcacaccaggtttggtttatccgttggtttgcctgcagcttccatacgcttgcgccaacgccatttcatcgccatcccgccgagcatacaggcctcggaagaaccaatggtgttggtgccaacggcctgaccatttttcggcgcaggcgcatgccacagatcggcaaccatatttacgcaacgcaggtcgatggctgcggattgcggatattcttctttgtcgatccagtttttgttaatggataaatccatcaatttgtggacattttcgtcgtcccaggtctggcagaaagtggccaggttctgacgagcgttgccatcaagatataattcgtcattgataatctggaatgcgacatcgtcgcgcatttcgtgcagcggaaaacgttttgattctgcgatagtggaaatagacttcgcaccaaaacgtgaatcgagtagttccgaccttaaatccgttacttgcttcttatccattttaaactccttaaaatgattggatcgcattaaaaaagtaggatttatcgataaagtaagcaagtgcaaaggactcgtgtttaaataacaaaatcctaatgttatttatcgtgagatattacgcgaataatattttttcattgaaaaacaatacaatatgaaattcttgggtggtggtaaggtgttttatgctgttatttttatgcgcattctgtgtctcctgaattatcacgtaaaaatcagaccttaaaatatcactattagtacttgattattattttgaacgcatttataaaattattacataaaaatagcgaatattgctaaaatccccgccaacgatgtgttgacggggctgttattattttggcaataatactccggtataagtatttaccggatgagaaagatattgtttaacggcagtgttaacattctctaccgtcatttgtttcaacaattgctcctgctcagtccatgctgcaggatcgtcatattgaataagactatttacaatagtgttcgctaattgttgaacgctacgctgttggatatcgaggctgcgctgaacgttttgctggtattcattcagttcttgctcactgatccctttagccagacgcttaaccatcacttcattcgctaacgttaacagttcatcatgtcgttctggttgacaagtaaaagccagcaaatgactgatatctttggcctgaggatcaaccgagaggcgagaagaaacgctgtatgctccagatgcctgttcacgaatattaacacgtagatcttttgccagtgcgacgttaaaagcatcgagcgccatacgcgtcggcagattaacaggtgtccgggaatcataacgcttccactgtgaaacctgtgccacaggttcattttgttcttttacagtaaccgatgcgttgtccgtcgcgcgagttaatggtttacctgcggctaatggcgaatcagagtgtttgattgatcctaagtaacgcgtaattaacgccacgagtttgtcttctgcgacattaccgacaatgacaaacgtgatatccgctggagatgaaaacaattggcgatcggcagccagcgcatctgcggcagtaaactgtgcaatctgattttcttgcagtaatttcgtgcggtcatcagcatagcgcgtctcatacatctgctgggcgaatttctccgctggacgctggtcgagcgttttcaacgcctgaatttgagcattttgtagcgatgcccaaatattatcgttaatcgtgctgtgggtgattcgctggttaatcaactgaaaaccaggttcagggttattagtccgcgcgctaacggagagcaacgtattcatgccactgactttactgctcatggttaccgaattttccgcactccagcgtttcaggctggaagaggagagttcgccaacgccgcttccgctaactgctttatttgccagcgcgataagtgatttttgctgcgcagggaaacttaaatcgcctttattcgatacggcaataatttgtagcttttgctcttcacccgcggattttgccagaataaccctggcaccattggaaagtgttaatgatgtcagattctccgccagcgtttctttgctgctaatttccgcctgtgggtctgcgtctactgttaacgataaatttctgcctgggaagacgtaagccgccagctttttgttggcgtactccttttccagcgccaggatagccgcaggagacaatgcttttttggcggcaacctcattgtttaccatttgctcccaaaatgcgtcctggttctttcttaactgctgccatttttccgccagactttgcacggtaatttgctgccacagacgtttcgaaagttgatatgtctcttccggcgacaagaacggcgtattatttaatgagctggatgccaggcgactggtcagcatacgtaaatcacgttcagcttgctgatcaaccgcatttttcagccaggtgaggcgggtagatttgacatcatcgagttcttcagcagaaaaaccatgctgatcaatggttgccaactctgccattaatgcattcgcagcatcctgcatattatcgtctcgtgcatttacacggaaaaacagcgactgataatcgggtgcaattttaacgctgcgcgcagtgccgccagaaatagtcttcaactcgcccgactgtatgcgttcctgcagacgttgattgaacagctgaactaacatgctccattcagcttgttcgataaagctttgctcatcgttcacttgtaccattggcaggcgataatagagtgcgatgccgttcacccggttttctttatcattaatgatattaaagcgcaggtggttttcggcttttgtcggccagacgcgattttcagctgctttgttagccggaagcttacttaaattatcctttatcagcgccagcgcttctttactgtcgatatcgccgaccacgataaaggtcatattatttggttgataccagcgttgataaaattggcgcaattgtgccggtgtgaccgtggcgacagtatccatcaggccgataggttcacggtctaaattacgggtatttgccagcaggaaagggcggcgcgcctgagaggtgcgccatttcgcatcctgatgggcacgccattcctcagtaattacgccacgttcagcgtctacttcgagtttttcaaaggttgcggcattactccattcactgaagattgccatcacttgttgcagattttgtttctgcgtagtcggcaaactcacctgatacaccgtttcgtcatagctggtataggcattaacatcgcgaccaaaacgcaggcccattgactcaaatgtttcgatgactttattacccggccatgtttttgtgccgttaaacatcatatgttctacaaaatgagccacgccgagctcattgtcttcttcctgcaatgaaccggtatgaatttgcagccataaatttacctgatcctttggatgagcatgcggataaatcatatatcgcaagccattgtccagttgcccggtaattaacttttcatcctgcggtaaggcggcggcaatcagccgcccggggagcaacagagttgccactaacgtcagtaagaaacagaggtttctcataattatctccatgcgaaaaccgggcgaatttacccggttaagtaaaatccgaactattaaaatttcatgctgacatcaagccagaaagtacggccactggcgtaggtcgccacaccggtgttcgttgtatcaacagcggttttgctatccagtacattgagaatatcggcactgatcgtcaggttttgttgttgcagaaattgtggcgtccaggacaagcgggtgtcccaggtcaggctgctatccagtttttcgtcaacatactgcttgtaatctgaatattcgctgatgtattgcgcatttgtcttaccaaggataatgcgagctttacgcgcttcttgccaggccagcgtattcgcccacactaacccgctcggttgatgcgtgaaatccatgtttaaggagatctttaatgggttattaaaatctgccactggaacgctatcgtaagagaccagattaccgttataaaccacctggttatcaccggtattgctctcctcataaccattgtttaacgacaagttgcccttgctcttgatatagctaaagacaatttgtgggttaatatctacctggcggatatgcaggggttcggccagttcaaaactgaggctgaacgaatgcgttttggttttgccatcgttgttatattcagtaatggtggttttagtcgcgctgtcggtacgactgcttttgctgatttgatcatgcgcttcacggtaaacatagtttgcacgcgcaataacgttcttaccgattttctgctgcaatcccattgccagttcatcgttataaggcgttttcaaatcctgataacgcgtcagagttttattacctgataccgattccgtccagctattgcggatatcacgtaatcccatatcaagaatattcccgccatagtaacggttataacctgctgtaatcattgaggtttgattagcaaaaatatcccattccgtcataaagcgcggggagatattgtggtttgacagatagttgtcatagtcataccgcacgccgggcattaatgacacattacgccagctaatgcgatccgccatatacagcgtgtagttgtcaattcccaggcggcctttacctttatggtaaatggtatggttagttttctttccggcagcattaatcacataggattcagactggttatggcgttcagtccacgcatcggaatagatgtattccgcgccgaagtagggttgatgcgaaacattacccacggcgaatttttgccagtccaggcgtgttttgaaggtgtaattatctacagcctgggaaatgtgtcctaatccgccacgggtgcaacgccctgtaatatcaccatatgtacatgaaagttcggtgtaccagatgtcatgatcgtgacgggtataatcactaatatgatcccaaccaacggtggtacgcagtttggcccatgcgagctgcgtatccatatcccatgccagaccataggatttattacccatttcgcgatcagactgcgggaaggtgctggtattataatcacggctggagccggtatattttaaggttaaatcgtgggtaaagcggtcgctggcaaaccaggtaaatttgcttaatgcagtatcgataacgtttttatactgtgcccgaccggcgacaatgccgtcattcgaaacataatccgcgcgggtgatatcagactggcggcgcgataaaccggcggtaacgccgaagttatcagcgagttcctgattaaacgacaaggtataaaagttctttttaaaatctggggagtaataagtacttcctgaagagccttgattaaatgcgctcttgttattctcatcgatatgcgatgttaaccagtccgaacgcgtagtgcgataacccaatttcaccttgctatcatcagcgttgaagcgtttgatctttgcatcaattaccccgccattgaagcgaccaaattcaaccggcacaaaactgtcataaagcgtcacattgtccagtaagctgacatcaagataatacccctgtgacatcccgctaatattggttgcactactggcatcggactcattcgctgggttcaggttattagttgcactaataccgtcaatcaaataggcattctggtagggcgacgcaccgtgaatagagattttctcagggcgaatatctccctggttcaacgaggtactttgcgttgaatccatgcgtaccgcagggttggttctcagcagatcgctgatattgccattcccggtcggtaaacgctcgatgctttcactggtgtaatgcgtgttgccgtttacgggtacagggacaggagcatagaccgtcatctcttcaaaaaaatgcatgtacatgtttttgtcatcgacggcctgcgccacatcagcgccacataaaatgacgccaggaataagaactcgcttcatttatttatatctccgtacagcagggcttttattgtttttataaaaccgcgctaatgtcacaaatatcatcggccaggttccagacaccgggttgatgtgtaaccataatgacgccgcttgtgggtagtttttcacgcactaaacgcagtaagcggatagcctcttgttcctcaagatgagaggtagtttcgtcaagaaatatccatttcggacgtcgtaaaattaatcgtgccagggcgatacgttgtttttcgccgctggaaagaatatctccccagcgatcgtggtcatgaatacgcgcagccaatttcccaagaccaacctgatgcagtacttcgctcaacgatttatcgtctacgggcaggggaagtgctttacaaataatctctttcagtaagccggttttgattaacggtgtttgtgacacataccaactgtcagcaggagaagaaatatcacctttaaaccacggccagcagtgggataatgttttaagcagtgtggtttttcccgcgccagagtagcctttcagtaatagccatttgcctggcgaaacatgaaagttcaggttctctaatatgatcttattatcaggcgtacgaatactcgcatcagccacttgtaccgcatgttggcaatttttaggcttattcgtagggcgctgttcagtgagttgatggaactcatacaagcgatcgataaccgcagccagttcagcaagttcgtcatatttataaataaaccagcttaaattgttcgataccagcataaatgcctggcgcgatttcatcagtccgcccagattgatctgcccgctaataaactgcggcaataacagaaagtagggaagaacgctaagcgagcgcgaataaatattctgccagtaatcaagccaccgctgacgattcattaaacgatgccagttctctttaatggtatgaaaattgtcgctcaactcctggcgttgtagagactcagcattgcttagcgcaatcagttctgcctgcttattatgctgcacaagatttgttcgaaatgtcgcttcgctacgttgtttttccacattaagcggacgaatacgtttacccaccttatgggtaaataaagttccaccgatcacaatgagcacgacggtatagaccatatacccctggatattccattctgttccaccaacagtgaatgagagcgtacccgcgctttcccaaagaataacggtaaaggtgatcagcatgctaagtgactggatgaagccaaatgaaagactgagcgttttgctgatcagtaagagaatgtcttcagcgatacgttggtcagggttatctgtatttttatgctcgccgtagatctgcgtgaagtagtagtttttatctgcaaaccaccgattaaggtagtaatctgttaaccattcgcgccagcgaatagtcagtagtttaattaaccatgttttgtttacggatattaatacaaagatccccagcagggcagggaaccaaaggacaagctgccaaagcttatcggtttctttctggcttagcgcattgaaaaaatcattattccagtcgtttaaccagacctgaattttaaccacgccaaggatcatggcgaggataataatgattaacaacactgaagttttattattcttacgcagccaaaagggcttcaacagacagagatactttgctatcaacatacgaagcgtaatgggaatggttatcattagcgaaaattgattgtgccatccaatgattatctatggcaatgatttactgatgaaatttatttaagtatcatttaacaatatgaaatataaaggaatatttcattttcagtggttatggttatgctattgataatcaaggatattgctaatgccctgatgcataccacgtaagccaggattttcgcaagggaagatgatgatgacgaaacacccgacaggaatttatgtcgggtgccttgttaaggtcataagaaggaggctaagaatggagttaaaagagagcgttattaattattctccatttgttttgcaacatccataatgtggtaaagcggtactctgttcttagctaactctaccatggcgttcatataaggtaccatggttgaaaaaaggattttataaccttcgcaaaaataagaaacagtctcattgtttactttagtaatacgatgcttaggacaaccgccattgcagataggtttatatgcacattgctgacatttcgctggaatccgttttttttgcgctgtcagttgtacactgttcatcgttttgagttcagatttattaatgtttccaattttgtactgtggatagacaaaatggtcgcattcgtaaatgtctccattactttcaacaaccagattatccttgcaggactcctggaaaatacaactggtatgcccattccccaaaaaacggctgacaaagctttcaaactgacggatgaaaatttcacccacatcgtttttaacccattgcataaaaatggttgacataaacttgccataagccgtgggaggcacagaaaaatcaatgatacggaatgtgttctcactatgaccactgaaatcaatattcggcgtcccggtttctagcaattcgataaattgcatatgtttactgccgatagattttaaaaaatgataaacctcaagagggtaatggacattaacgttattaatgacggttaacgtattaaactctacttgatatgatttcagacgctcgatggctgctatcacttttgcaaaagtaccgttacctgaattactgcgtctgtaacggtcatgtaactcctgggggccatcgatcgagataccaaccagaaattcatgttctttgagaaaggcacaccattcattattcaataaaatgccattcgtttgtaatgcattaaaaatacgtttttggcctgcatagcgttgttgatagtgaataactttacggaaaaaatccaggccagccagagtgggttcaccgccttgccaggtaaaatagacctgattgccagacgctgcgatatattgtttgatgaactctttcagagtgctgtcatccatccatttttcatgagtaaactgcgactctttttcaaggtaaaaacagtaatcacatttgagattacattgaaaactggagggcttggctgtaacgtgcatcgctatctcgctcaataaggcggcggaaaaatccgccgcatgaaggtttagttatttcgcttcgcttagtgctttcttgatattgttaaacttctcctgatttacctcgctaagcggtggctggctgctgtcgataaactctcttaccacgccttgcatctctttaacgacctgcggattggcggcggcaaggttatctttttgctgtagatccgtcagtttgtagagacctaactgattgttttctactgtatagacaagcgaataatcgttatttctcaccgtataagagaattggcttaagtcctcagtgttggggttatgcgggtaatcgtctgactgatggcgaacaaatttgtggtaattatcccagaatggaatattttcctcgtcaaaccagtgagaataagaggttatccaggtcagatttttatgtggctcgccttgtttcttatcttgcaaccagggcagcaaggaaacgccatccagcttaaggtcttttggaatgctgatatcggctgcatcaagagctgtcgggtagaaatccattgcggaaatcagcttgtcataattaccgggttgaagttttcctttccaccacataaacattggggtgtgagtaccgccaggataggtctgactcttatagcctttttgcgccccgttcagcggcagaggaccatcgataaccgcaccattatcggaggtaaagagaataattgtattgtcatactgtccgtttttcttcagttgttcgagaatgcgttttacaccctgatcaacagaataaacggaagcgtagtagttatctgctgtttgactaccggtattaaattgcttctgatattgatccggtgcaggattatcatttggcaggtgcggagcattataagccaggtaaagcataaaaggctggtcaagtgttttggcacgatcaacaacgccaattgcctcatcggttaactgatcgctgatataaccttttgcggggacacgttcacgatttttgaacagtgaaggggagttgtaatatgccgttcctgcagcgtggaatcccataaagtaatcaaagccacggttttgaggttgccattcttccgcagaaaatgtggtgaagttgtcatgatagtcacgcgtttgtttatcttccggtaccggcacattactgatttttgacaagtgccatttacctactgctgcagtgtaataaccatgattctggaataattcaggcaagaaagtttctgttagcggaataccatcctgagcatcggtattggaatagacaccaaagcgggcgggagctcgaccggtcattattgcggcgcgggaggggccggaaacaccgtgtgccacatagccgttagtaaaacgtacgccttcatccattaatgaaaggagcgtcggcgttgatttttgtgcagcttcaatggctttatctatccctattttgtaggtatcgacaacttcacgattttccattgtttttgggtcaaaagatcccttatcaaaaggaagttgtccataaccaagatcatccatggtcagtacgataatatttggctttcctttggtactgtattctgtcggcgtaaagtctgagaaagcaacgtttgttttggttgctttcagctttacatcatctgccgcatgagcagcaaatgcagccataccagatgccagtatcaaagatatcgaggtacttacgacacttttctttaatgcagacttcataaatgttcctcttcttattgtacttaattccaaagtaattttacgaagagaaataagtggatgtaagtgaagttagtcacataaagagatagcagatttagctaaaaaaagggaaaaaacagtccataaagcgttgacattactttctgttctattaagtaatttctcgccgataaacaactaatttattgatatttaataaattattgcattttactgacaaaatgcagaattgagatcataaataatcatgcaacaggttatgcaagtgcataaatatgtgatggatgtcacttatttatttcaataaatatatcgcctaaaaacaacgcggggcagggaatggctgccccatttaattcttacgcagcgtgtgtggttgactactcgttagcaaataatcaaatagctaaagcattcatcgtgttgcccgtattcatacccgtgtgactttgacaacggtactccttagaaactctcttcggactgttgccgaaatgtttgcggaacgcataaataaaataagatgtactggcataaccacattgttcggcaattttattgactgaaccttctacgcgtatcaaattttttgcgtgctgcattcttgcatctaaaagaatctgtgagaatgtcgtttgctcttgcttaagttttttcttcaacaggctttcactgatgtacaggcagtcacaaatatctttcagcttccatgggtgcgccggcttcatgttgacaatatttctcactttcccagaaacggatagcacaccgttagttaatagtgtaatgaaacctttgcatgcggcaaaaatagacaggcaagaaaaaagcaaaagttctgaaaaattatgatgattgcgttcttccgagttgagataagcaatcatttcattaagcaatccagtcggtacatttgaagcacgtaaaaacttcgcaggaacaggcaccgtcactgtctggatgttagtgcattgtagatattttttaatggtattttcagtaaatccgatctctttaaaatgccgctcataaggttcaaaatgcgtacgaacagcgttatctaccatcaggatctcgccgtcagagaaggcgtaatctttatctaaaatgttagcgttgaaggcatgatgaataaatataacagaacaaacgagcgacattttatctccttaaaacaataaagtttttatcgatacttttttaacatttcatatttataatttgctgtttgttttcagccttgcaaactattgataatgaaatgtgtaagatctcttgcaatgcgacccatttctgaaatactcagctgatcaattgccgaaaaaatggctatcaacgtaagtgtcagtaataagacaaccacaattgcagacatgatttctttatagttgtctctttgcgtgattttgtttttcactgtggtcgcatgcatttcaaatatgtttatttagcggataacgttaaaaatcgttaatcagtatgcttaatataacaggctggagaaaagaggaaataggactggtgcttcagtactgagcggagtttcttacagctgtaggcagaagtttatatcttatagtatgtagtttaatttaatccatgtgagcaaattgcgaaataatagtcaatgaggaattcttctgctgtgcggatgacagcagaagaaatgagaagaggcattaatttgatggttctaattcaaccggaatacttttatagccaggaatgccacttaatggatcgtggttatcaagtgttagcatgtgattcgattctggaaaataggtcaccagtgagcggtcagccatagggtaaatgaccacttttaatctatccatgcggcgtgagctgcgcttaccgtctggcgtaagcgcaataagattaactctttcgccgttttttacacggcaaattttagcttgtttagcactcataaagaccacatctcgttgaccgaatacccctcgatagcgatcatccataccataaatcgtcgtgttgtactgatcgtggctgcgtactgtcgccatgaccagcttactgttaaacgctgaagagggatcttctaacagccctttgctggtaatgaaattagccttacctgacggcgtcatccagcgcctttcagcagctgcatttatcaggtgaaaaccaccgggatgacggatgcgctggttatagtcggcgaactctggcagcacagcttcaatgtcattgcgaatgcgatcataatcttccaccagatactcccaggctaccacgctctggggtagtgctgcctgcgcgattcccgcgaccactgcacactctgatttcagcattacaccggcgggttttaacacgccacgcgaggcatgaatcatcgacattgaatcctcaacggttaccgcctgcgcaccgtttttttgcatgtcaatctcgctacgtcccaggaccggcagaatatagctatgccgtgcggtcaacagatgagagcggttaagcttagtggctacgtgtaccgccaaatctaattgcgttaacggtacagcgctcgcttcccgatctggcattgccagcgcaaaattgccccccatgcagatcaatgctcgagcctgccccgtacatattgcttgcatgctggcaattgcagcatgtccaggtgcatgaggtggggtgaagccatagcgctcacccagacgagccagaaactctgcagacggtttctcggtgataccgacggttcggtcgccctgtacattagagtgtccacgtagtgggcagatacccgcaccaggcttgccaatgttacctttcatcaacagcagattgaccagttgctgtacgttctgggtaccatgttcgtgctgagtgatccccattccgtaacagataatggtgcgttcggcagcggcatatgcgtcagccagttcggcgatttgtgtctgacttagtccagaaatacgttcgatatctttccactcggaattgagaacgtcacggcgtagctcgtcaaagccgacggtatgcgtttgaataaactcgtcatcaagcaatgaaggccgacctgcggcgcttgcagcatcatcgcgctcaattaacaggcgcatcatccccttgagcaacgccatatcgccaccaatgcgcacgttatagtaggcactggccaactgagtctcagagttcgtcagcatttcaaacgggttttgcggtgcggtaaatcgctccaggccacgttcctgtagaggattgatggcgatcattttcgctccccgtttcactaaagcgcgcaacgaagtcagcatgcgagggtggtttgtaccagggttatgcccaatgcaaatgactaaatcgcacttctcaaagtcttccagcaacacggtccctttacctacaccgatactcgctgccaaacccacgcttgtcggttcatggcacatgttggagcagtcgggaaagttattgctcccgtattcacgggcaaaaagctgataaagaaaggcagcttcattggaagtgcggcccgaagtatagaattcaacctgattgggatcactatagctttgaaggcgtgcgccaatttcgtcgaaagcttgttgccagcttaatggcttgtaacagtcgctgacggcatcatatttcaaaggctgagtgagtcgccccgcagcctcaagctcgtggtctccccaggtaagtaatgattgaaccgtattctcagcaaagaaagaggcgtttacctgcttatccgtgacttcccaggcgattgcttttgcgccgttttcacaaatgtcgaatgacgcactgtgcttaggatctggccatgcacaacccggacagtcaaagccctctggcttattcatgtcaaacatggcaataacatcctggcgtatatccatctgcttacgtactgcattcgctacggatttaacagcaccccaaccacctgcagcaccctggtaggattcaatttttttcttcatctacttatcctgtgtggaaatgaattattaggatttgtaatagcgatgatgcacagtacatacaaagggattatcgccaacatggatatataagagtaggggactactctctttctatttttaatctattatcgttaaacaatagattaaatacgataagttaagcatcatctctcatagtgtttaaattaacatatttttcaatataaaaaataagactctggcttcaattgtgcgcggattttcttacaggtgtaggctaatagccttcacaaaataattatccgcgcaattttcgtgaatggagcgcatagactaaggtcaaaatcacaattattcatagataaaagtgacaccaatgactgactggacggttccggctgaaaccttgtttcctgtttgtccataggttgcgcttaaacccagaggtactttgcttttatttactgtccccagggagacattttctcccgtagccagtatttttccattacgcattagagtgacacccactcccgatgcttttgttgcatcaggtgctgtgttagcaaacacttgtcggctactgtcagtggtggcacccgaaagataaaatgagagcttttgttcgcttgagcaatatacgccaaggggtatttctgcgcttccaggaaagtccgggagatccacggtgacatttcgactatcaacggtgcagccgcctgttggcataacaacattgttatttgaaataatattccacgtaaaattacgcggatttccgcttcctaatgttgcaattttatacatatgaatacgggcaatgacttcccccgcttttatgacaactccaccggccgccccaactggggtaatatagagttttaacggtaatggcatcggtgtcttatcaccaatatccaatacgttggtatttgtcgtcaacgggaaggggtaggtcacattattccagtacagcgatcctttatatgactgtagggagcctgcgaaagctgagccttgtaccaggtttatatgatcagtgtcgtaccagccgccgtaatcattccagcaacttatatgctgagacaagtctacaaccagattctggcccggctgtattacagggtcgagattaacataaacagaggttgtacctgctccaatacttgacccgccatcgacattacaactgaaggcaaaaactttgcctgccattaatagaagataaataccgaacaggacctttatactgattgttttacccatgatatatcctaaggttaaaaattgatttaaaaagaaggctaagaaaatcgaatcgacgttattgccaggtgtagatcacattgattagcgcctcgatcgttccctggcttgcgtttccattcaccgtgatagctcttgccttaagtggaaactgtgcattacgagtgatctcatcaacaataaccgttttgctatcgccattttttaacgcagcatcctggtcatccctcagctctatctgaatattttcggcagtaccttcatttttgtaataacccgtattgtcagttgaacctgtcacgattgccgtcactgcacttgtttcaaccggacaatcggttaatgacaaagtaatattgtgccagccagatgcagaaccaggttgttgcagattgcgcgtataaagatccccgagattaacgttagcttctttggtttgaatagtgcagggtttagcgactacccgaccattaacagtgatagtgacatcggcggcctggagagttgctgtgaataacgcgcaaaacgtagctaacaggaacctcttgtgaagtcttttcatatctgactctgattattgaaattcaagggtaaaggttgccgaagccctcaccagtcccggattgacggacttctgagttgacttcagacgagcggagtaaggcaaaatattgttctgttctggtaccagtgggatccactgcatcccggcatgaagatcattcagtttcaccggacgcatatttgcgtccaatatttctatacccaaaccggaggccgtattgcttccttcatccagtttcaacaaagtattattttctgcatcctcaataccgttaaatgcaacccgaacccccgttgtccctttgctgcattcacttaacgtaatctgaaaagggacggctggacttgtgctaccggtcgttggaaattgtctggcactgtttttttggagatctacggtaaaattaagcgaatccgatgagactgtgcagccataatcgaggacgcgcccgctaattttaataacgctatctgcggataaagcagaataggtggttaaccccagacataaaccgaggaaaataatgttattgtatttcataatctattgttccttagcgacagattgctgtctgctggttcagtaaggtaccaggagaaacttcaggaagcttgtactcgacaatacagtttgagtttttatctttgccccatgaaacctgtaattgccctgactgtggaagtccagtcagataaacctgaccattttccgcgacaatgctgccatttttattctctccgtgtgtgacaattgcaccgaatggaacgctcttattaccgtacttcaacgtcattaatactttcccgccgatttgtgcattaaatgttgctctggcaatagcaccgtgagttgggatgacagtgaccacggtttcatccagttcaacattatctgcaagggaattcgcgttaagagcaacacggttttctctatattctgtcgcaaatggtaatatggcatagccacgccagtcggtatgaattccggtctggttctctattttgacattatcagcaccaggagccttaaccagaaccattgtgtcgcccagcggctgtccaaaggtgatgccatcagcatgagcaataatcccaccactcattccgtaataaatctggctgctgtcaccactccgactgtaaccgacattagtattaccataagctccacgataattaagagaactgtaaccactggtgccagacgatgtattacctccgtgggtgttaccgacctgaacgctataattcaggttattatccggcagcagagtgccataaacccccgatagattggtcatgccgcctttcaaatcgtttgacatactgtaactggcgtttgaattacgaaatgccgactgactgtctgtacgcatccaatgactgaagggaacattaagcgtaaaagcgagtaaatgatcccgatcgttttgccatatattattggaatagctgtaattcagcgaagtcgtaatatcaccaaacggcacatttaatccaaatgatatttgctggtcgctgcgtgacgtgttccagtaactttggcgactggcactgaaaaatgtcgtaccgtaatttccaagctgctgagagatgcttatttgttcctgaccacgcttactgtagaacagattaaaataatcaataaattgtgtctgctcattggtgtctccggtaggaggcttgacggtgtaaccactcattcgactgtaggcactgtcggataagttataaaaaccttgcgtagaatagcgatatcctgcgacctggatattggttccacaacaagtttattgctgcacttgttgaagagagtatttgcaaaaacattttatgtcgctaaataacatgacgatttcattatgcatgttatttataaaccgtgactaaacagaatattattgcgaacaagggaagtgtcaggaaaggtcaagagctaccaatggttaatatggctataaatcattagctatggttaatgtttgcttgctgaaactaacaccgaattgctctaaacagataagtgcagggtttattaaagctgtccgacagactttcttaacctggtaatatctctcttgggtgactctccaaacatccgcgaatattcccgactgaaatgggatagctttcgtaaccgacagcataggctgctgtggtgacatcgtaatgttcattcagcatctgtcgcctgacttcattgagacgtagccatttctgataccggagtggactcattcccgcttgatccgtccttaaataagtaacagcaccctctggtgttttcgtatgcagtgtctatgcgacagacactgcgctcttagcatggggcagggaataaccaggctatttctccatgcacaggccaattatgaaagaggagaggcttaagttcttgaaccctgaacgaataacgactaccagaaaagcacttcgcatcactcagacatgatttaacataatatacattatgcgcaccaatataaaccaaggaagaatccagtcgttggcggtcatgattgtcatgctcattaacaatgaccaaaccccatatctcacttactaccgtattctcggcttaaccgtccatgcaacctcaacacattgctttcaactgccgtcaccacgttctccggaaaatctgtcggtaatgaagtcttcacgttatccagtgctgctggaatcattctggcaaagtcactcaggatttcatgcatctgcacttccgggaatctcagcacctttgctgtcgccaaaaaatgtcgcggataaattttatcgattgccgtttttttgcctttggatgcgttaagccccattgccagtttgagatcgctgatgtgtattcccgtaccgccaaggaccggaaatgctgaaatgatgtcgtaaaatggcgtgagtcgataactgccgccagcctgaataaatacggagaagttttttgcatgaccgtccgttgcgccaatcaaccactggaagacctggaatttcataaaatcatagcgatctttcagcgcctcgctggaccccatcaaaaaagccatgatccgcgcgatgcctgggcctccatctgattcatatttcaccgatgaaggtaaaccgaatgtctgacacatatcctcctgtggcaagcgaagtaaaaccgttcgctcagcattccaacgcctgtcaaaacgttcgaccgctaacgcgcgcacatttcccgctttaatgatttctgcgtccggaacattcaacccaagttctttcgccagcagcagacagtaatactcattatcaacgctttggctgagatcgagcgtcgcattgggctgcctgatttcgccaatcggtaatttaatgatgtgcgtcgtcggcgttattcctttcggaatgcaccagtcattgcctattctgagcagtgctgtcttctcctgtgcgccagcaaccgagatgcgaaagtcattttcttctctaatcatgcctagcgggatatctgctttataagccgttaatacttcttcaagtctggcttcagtaagcttttcccatgccattatcggatgcgttacggtttcgtcttcgggtattaacgtcacggcaccaacgctgtctcgccctatttctgacaataaatcaaacggttgtctggatttggcatgataacgtttaacgatccggtcacgtacaatcgggctatcgggtaacaggttatcgaagaagttaaatacggcatcagaggtgatattccccctctgcaatggcagcgaaagtgacaacggtctggcataacggcttgctaaccactccggtgcatacttaaaggtgtgcgcgccgttggctaacttcgttaactcgcctacccgctggttgttcatccaagtgacaagtttaggcattaccactccagattttgctgttctgttgattctggcgaggcatttttcgcgtcgcatagcgtcattgagagttcaagcgactgtaaaatcttaaaaaatgtcgtgagcgtggtattgtcagggttgttttcgaaattggaaatcgtcgcctgcttaataccaatttttttcgccagctcgctctgcgtccagccattttgctggcgaaccagtttcattgcattcgccaattgcgttgggctatagatcttctgaaagctcatcatgtcatacgtccacagcaagtttatccgcttaaggggatattataagttttatcctttagtgaggataagtcaatctggaaacacatcttatccgctctacgggataaacgctgcgatatccgcgatcgcggataaaaaggaggatttaaataaggcgttgatgcgccgtttgaagtcggcaatattaagccgcatgccatctcgacatgcggcttatacggtttaccagctatatttcactcccagcatgccctgagtatcgctatagcctttatcacctagttgcacaccgacattcccccacaggctaaggttgttatttactttcgcctcaaccccggtacgtacttcaccgagattacgcgcaccttcacggcctacggtttgaccattcatcttcacggcgtagactttgctattgttgatccagttcgcttcaatgtaaggctggaactcacgctgtttaccatcgtcacgctggtgatggctgttcaggtaggttttcaccccaagtcgcgtttgcacatttccgtcgccttccgtttcaatgcgcgttccgtctttccgggtatggtcggaatctttcacacccatccaggtgatttgcgcctgtggctggacgtaccaggtattcagcgtcccttcgctgccgctaaatgttcccgcttcaaaggtatacccaccctcaacagaggccgtcacaccgcgagaatcatagtcgtcagcagaacggttatcggaactgacgctgttatcaaaccagttatacagcgcccagctgtcaacataagcgccggtcttattcgcatcgttctgataccaggtcgcgtacagcccagcgctgtaaccgctgatgcgcccatccgatttataacccacacgattactctgagtattactgtgctgattggcgtagcctgccatcacgccaagatgccagcgatcctgcgcgttgctactccactgcgccaaatcgccgcctagctgcaatacatagcggttagcctgagtatttagctgaccgtcaccggcccttgaacgttcgtgccctccgacatgacgcatccacatactgcttgccgacccctgagaatgcagtgaatctgtatactgcggctcacccagacggtcgtgtaaacgatggctaaacagcgagttggctgcggcaatgttgctgatatagcttccggcctccgggcgataaactgatgggccttccggatccacaacagggggattattgatgggatcgggtgtatccgctggcgttacgccgtcccatttactggtcagataccagtttttctcgtcattccccttccctttagccagcgtgtagacgtaagccccagcttcgacagttccggtggtcagcgcgaagttacctgcagaattaccgccaacctcaatgagttcaataccgttgaccgtttgtgcaccgacgccgccaatgttatcaacccgaacgcgagtgttcccttgggtatcgcctttcacgttcatcttatcggtgggcgaattatcgccgcccagcgtcgcgttgaacgtcatcaggccattgtttccggtatagttgccgttaacggtcagtacattccccggtttccccccttcgctattcatttgaaccgtgccgccattctccaggttgccgccgatagtggttttagcgacacgcagtgccccccccaggcataacgttcatatcacctgcagtggtgacatttcccgacatcacaccgctgttatggatattaatgtgttgacttgccatattaatggcagagtcggaaccgaaagcaatttccccccccacgatatccgtcgtaccctgatacgccgcggaatcgttgttaagagtcaggatcccggtacccagttttgtcacatcaccgctaccgctgatactgtgcgtcatcgcccagctacgctcagtggagatggtgagcaggccattattgataacggaagcatcacccaggtttttctgctcgttgacgctgagcgcgctgcctgtatcaatgttgaattgccccacaaagcggctattatcgccatccaactctacatctgtcctggcggttgcgctcacgatacccttcccgcttatgctattacgcagttcgccagtcacgttttttagcgttaacagaccgtcattggcaatatttcctctgcctaacccctgagtattatcgaggctgacttccgcatttgggctaatgctggttaacgcattgtagcgtgcattaagcccctcgatagccagcgttccccctgtaacattcaggtttccgccacctgtcagttcaccctgactgatcccacctttatttaccgtcagcgccccctctttgaacaaaacagtcgaacccatctgcccggtgaatgtctctaccgtctgcgtcgatccattaagatcgacgatggccgcgttgctgatgttcagttcccgggtgttgccaagtgcaccatccgcatcggtacgtaatgtccccatctgaacgtaggttgccccctgatagtcgttctgaccgttggaaagcgaaacctgtcgcaccgtattgattgccagatccccttcaccaccgatttttgccgacatatcggccgttgcgccataggctccgccatgttcggctaacgtcagcttttgcccaccatggatgttcagcgctttcagcccatagttaacgtacaaaccattacctggtgcggtcgtgaggcggaatccataatcaccctcggcgaccaccgttccgttttgcgcaatgtgtaacgttttgtccgcttccacctcgtcgccctgtaaatcacgtaacgttaatgagccacccgacccaataaccgtttgcgccttcaccagttgaacgccgacatggctatcgtcgtgttccagcaaattgagcgtcgtcagagggttattcgccatgggatcattccacggtttaggcacgtcgataagcacgtcgcccgtcccgtttacctgatagttacggcctttccaggtgtagtcacccgcgccgacaaccagcgtatcgacgctgatatatccctccgcgagcgtcgcagcaggaatatccgtatcgaaaatgatggtacctccattcatggccagtccaccaatggattgctctccaacttttaccgatgtggtattttcactgtcagactgcaacatcgcgtgagtaagcgcagcggtgttgtcgcgttccagagtgaaggtactgtctttcagttgggcaacaccggcgaattcagtccctgttgcatgggtaaagccaaacatcttgtcggaggatgacagctgcactcgcatcaagccatcgcctttgagcgcattggtcagcgtgtaatctcctgcactgttcgttgatgcgagaatgtcgagcgtaccggggtttgcaatggttacttcactcgaccccatgcccgttaccccatctgccgtatgagacgcaatggtcaggaggccgtcattgaccagcgttttaccgctataagtattccctgcattgaacaccgtatggcctgcatcatggatcacttttccgtctttatcgtcacctgtaatcagcatatcgacctggtagccggcatcactgttattggtatgattaaagacaaaaacgccttcgccaagaccaaactccactttcgtcgcattggtgataaatccggcatctgccgccgcctcaccgtgagcagcaccaatgtttagcgttcctacagcaggctcaaaaacacctaagtaaacttctccaccttcgacattcagcgtaccgttattcgtcagggttaacgtacccgtaccagatgtccctacgtacatattgaatgtttcaagaagagagttctgcccatccaccctcacgtcgcccttacttttgtcattgagagctatctgtgtatcacgcgctttaactatacctccggtggtaatattcagttcacccgtgcctaatacaccgacctgtagcaattgtgcgttagtagatgatgtctttaaattccagagactgtccgttgaaatattaactatccccttaccggaggcatttcctccgataaatccatagcccgttgaattaagggtggcaccattactgacatttacgataccgctaccaaaattaccgacattgatacccacagtatcgaacgatgatgtcgcatccatcaggttcagtgtgccgataccgcttgctttatcgcccaaaaaagtaatattttgcgatacgaacttaccgccatcgctaatattgaggtttccgacgcccgcaacaccaatggtggtatagacattcttattgacctcccacattccccccgtggtgatgctgacattcccgacgccggtttctccataaccgagtgaacttcctccgttgctgacaacaagcccctgattactgatattcatttcgccgtggccgtcataaccaagattagttccgagattagtgataacggagttcttatccttaacagtaatgttgcctgtgcctgtttctttcatccccgcagtgataattcccgaatctactttgccttcactcgagacattaagttcaccgtcgccagcatcaccgatatagatatagcggaaagcttcgcccgttccgaggaaattccaatgccctttatcggtcacgttgacgacaccgtgggaaccgtcctgaacgcccaccaatgaatattctttgttattaatcagtccattattggaaatattgactgtgccattaccgaaatatccattatagagtctgcgtaccgtgatgacagagtcttgatcctgcacattcagggttccgataccggtggcattgccaccgataatcgtattttcagccgtaaccaaccccccctcgcgaatagtcgcctccccagttccttgattaccaatttgaaattcaattgaggaatcattattttttattagccactcgccacccttttcaacgacaacctggccattactgcccgcctgatagcctaaaatggcgacgattgaactcgtgacgtaacccttatccgtaatatttaatgaacctgtgccatagctacctatttcgaataattcggtcgtcagaacagagtcctctccctcaacattgaccgtcccgacgcctcctgtcgaagaacctaatcttaaatagcctccatcgacgtgacccttctgtttaatattcagcgtccccgttccggattgacccacatttaaaggccttgcattatttccgctatcatacaatcgccaggtgccacccaaaacattaacggtgccctctgagtcctcattagcgccaatgacgctggtagtaatagtggttaaggaggcattaccgccagccaaaatattaagcactccagtgccataccagccaaccaggtaggcatcataagcaacatcagtatcaatattggtaatctgatcattatcaacttccagacttgcaccagacgctgaaccgcttagtgccagcaaaacacccagcgtcaatctactgaatttcgttgtcagtccagaggatttacgcaaattaaccgtcgatgttttacctgccctgcgagttaattccgagcaggcctgaaatacctgtagagtgcaattccatatcacgcgatagattctattcatataaacgctccatatacaaacaatacagccacgaaagagatgagtcgtcagacattaaaaatgaaacttattaaattgtcagaggtctgtattgagtgttagttggaggtgggaaggtgtcaatttggctaatttgctaatgctttcgaattgatagattaaaaattgcatagttcttattttatttaaatatgaactatgagttattgttgcttaataagaaaactgtttctttcaataggaaaattatcatcatcatatttaacaaagaatagcactaattgctaaaaatcgaagtttattaaaccccttttgcatccattagtgtctttaggaatattcgctataaaataagggttgtgcttaatgctttaagaaaaatagcaattttcccttgaatatcgtactggtgatggaacgatgaatctgcaagctggcttttaacaagccagctctaaaagaagggaaataagaataactatactcaaaaactaacagccacggtcatcatgatgtggctgtcaatgaaactataacccaggcgctttccataacgacgtcgtcagtccatgatcaaccagccccagctgatcctgataaactgcctgccacttatcgcgtgaatcctgataaagttcatgcttttccgggtctggtgtgtgcgtccgttcccagcgaaccaggcgttctccggtttctgccattgatgaaaaaattccggcaccgacgccagctgcaatggcacatcctaatgcagtggcttctttgaccaccggaatattgacgggtaatcccgagacatcagcgagaatttgactccataatttcccttttgaacctccgcctgcaaagactaacgatgaaggatgaatattcgagaaatcagcaatttgctgcaagttacacgctgatacaatcgccgcattttcttccagcgcacggaacaatgtcgctttgttacatttatccgggtcaatggacaagttaataaaggaaggcgcagcgtgataccaggttttaaagcgcattctgtcggagaagatcggcattacgccccacgacccaggcggcacccgactggccatctcttccagcagcgtataggtgtcgatgcctaaacgttcggcaatcagtttttcttcggcacagaaagcatcgcggaaccagcgcatggtgagtccggtaaaaaagcttatagattcagcttgtaccatgccaggaataacatgaggattaacgcgcacgttcatttctgggtctgtcaccggcgcggctaaatttacaacttgctgccagaatgtgccgccaagaaccgcggtttgtgccggacgcacaacgcctaacccaaggcaaccaagctgcacgtcgcctcctccaacgaccaccggagtgcccgccttcagaccgcagagttccgccgcttgtgaacttaccacgcccagcaatgtgccggtttctttgacaggagaaagaatatcggcacgtaggccagccatatccagcaatgcaggtttccagtcacgggtggttagatcaagaagtcccgtggtgccagcgttagagggatccaccgccagttcgccgctgagcatataggccagccagtcgctgatcatggtgatggttgatgcctgacggtaaatatcggaacgatggtgcgccagccaaagtaatctggggatggcacttaaagccagtgtttgtccggtcgcgcgataaacttcgttttcaaaggtattgttgtgcagttctttaagttcgctaacttcgcgtgccgctctggcatccacattggcgcaggcccagatcggggctccttcattattatataaaacaatgccttcacgcatcgaacatgccgaaacggcagcgatatactccggggctatgccggcgttgtgcagcgcctggcgcatacactcacacgccagttgccagtttttgttgagatcaaattccatagaaccaggaacgtccggtactgccagatgccgccactccgcctgtcccactgctatttgattgccttccaggtcgaatatcacagcccgaatacttccggtgcctgcatccagcgccatcaggtagtactttgattctgaaagggtaaagagtcgagccattagattatcctcggcttatgcgttctgtctgttcctctatacgttctccatcattcccggtaataaggtcatgcaaatttaactacgtaaaatcgccgctgctgtgtcctgatcggtaaccagtgcgttgatataaccgcctttcattgcagcggcaattgcttcggctttattttctccccctgccacgccaacccggacgggtatggtcttcagcgcgcttaaaggtaagccaatcagttcgttatgtattttgatattcgtgacaacgtcaccttttgcatcaaaaaagtagcctaaaatgtcgccaaccgccccttttcggccaatcattaactgttcgccctggctgatataaccggagcgaatgattgtcgcatcgtcctgttgactcacagcaccaatgccgacaatcgccacatccgctgcttgcgcggctaacagaacatctttgacgcaattttcattttttagcgtacgggcaatgtcagcggaggatgcccgcaacggagccggaataatattcacactgcacgccgcgttaagctgcccgattcccgtcatataagaaccgacgccaccggagagcgtgaccaggcgaatttgctgtgacgaaataaaaccacttaagcgttgcagcgtattcatggttgcctcgccaaaaccaatcgccagcatctgttgtggttgaagtaaactcatcaacatatgcgccgcgcctatccccagtcgcccaccgacatcagcatccgcaagcccagggatcacccggacatgttgcagcgaaaactgacgacgtaattgagtttcatattccagacagccttcaaagcgagaattaatctgtacgcgaataatgccggactgatgccctttctccagcaatcgcgacactttcaaacgtgtcaggccgagacgatcgctgatctcgctctgggtcagcccgtcgtgatagtaaaaccacgcgatccgcgcgacctgttcttcttcacacattccctgttctgaaattgccgaatcgttgattgtcataattcattcttcactttgaacatatttaaatctttaatgcaattgttcagttcttgctcatttatatctgtgatggcaaccacagtttgactctacgagcatgaacaaacgcaaccgtgaaaatcaaaatagcataaattgtgatctattcgtcggaaatatgtgcaatgtccacctaaggttatgaacaaattaaaagcagaaatacatttgttcaaaactcacctgcaaaactgaacgggggaaatatgcaaacgagtgatacccgcgcgttaccgctactttgcgcccgctcggtttataaacagtattcaggggtcaatgtcctgaaaggcatcgattttacgttgcatcagggggaggtccacgccctgctcggcggcaatggtgccggtaaatcgacgttaatgaagattattgccggtattacccctgctgatagcggtacgctggagattgagggcaacaactacgtcagattaacgccagttcatgctcatcagctgggtatttatctcgttccccaggaaccgctgcttttcccaagcctgtcgataaaagaaaacatcctgtttgggctggcaaaaaaacagctctccatgcagaaaatgaagaacttgctggcggcgctgggctgccagtttgatctgcatagtctggcaggatcgctggatgtcgccgatcgccaaatggtggaaatcctccgcgggctgatgcgcgactcgcggattctgatcctcgatgaacctaccgcctcgcttacccctgcggaaaccgaacgcttgtttagtcgcttgcaagagctgcttgctactggcgtgggtattgtttttatctcgcataagctgccggaaattcgccagattgccgatcgaattagcgtgatgcgcgacggaaccatcgccttaagcggcaaaaccagcgaactgtctaccgacgacattattcaggccatcaccccagcggtacgggaaaaatcgctctctgccagccaaaaattatggctggagttacctggtaaccgcccacaacatgccgccggaacgccggtgctgacactggaaaatctgaccggcgaaggtttcaggaatgtcagcctgacgctcaatgccggagaaattctgggcctggctgggctggtgggggccggacgcacagaactggccgagacgctctatggtctgcgtactttgcgtggcggacgcattatgctgaatggtaaagagatcaataaattatccactggagaacgtttactgcgcggtctggtttatctgccggaagatcgccagtcatccggactgaatctcgatgcttcgctggcctggaacgtctgcgcccttactcataaccttcgtggattctgggcgaaaaccgcgaaagataatgccaccctggaacgttatcgtcgggcgctgaatattaaattcaaccaaccggaacaagctgcacggacattatccggtggcaaccagcaaaaaatcctcattgccaaatgcttggaagcttcgccgcaagtattgattgtcgatgagccgacgcgcggcgtggatgtctcggcccgtaatgatatctaccagctgttgcgcagcatcgccgcacaaaatgtggctgtgctgcttatctcctccgacctggaagagatcgaactgatggcagatcgtgtgtatgtgatgcatcagggcgaaattacccactctgcactgaccgagcgcgatattaatgtcgagactattatgcgcgttgccttcggcgatagtcagcgtcaggaggcgtcatgctgaagtttattcagaacaaccgtgaaatcacggcactgctggcggtggtgctgctgtttgtattacccggttttctcgaccgccagtatttaagtgtgcaaacgctgaccatggtttatagcagcgcgcaaatcctgatcctgctggcaatgggcgcgacgctggtaatgcttacgcgcaatattgatgtttcagtgggttcgattaccggaatgtgcgcggtgctgttggggatgttactgaacgcaggatattcactacctgttgcttgtgtcgcgactttactgcttggtttgctcgcgggatttttcaacggtgtcctggtcgcgtggctaaagatccctgccattgttgccacccttggcacgttagggttgtacagaggcatcatgttgctgtggactggcggcaaatggattgaagggttacccgccgaactgaaacagctctccgccccgctgctgcttggcgtttcagcaattggttggttgacgataattctggtggcatttatggcctggctgctggcaaagacggcgtttggacgcagtttttatgccacgggcgataatttacagggcgctcgtcaactgggcgttcgtactgaagccattcgcattgtggcattttcgttgaacggctgcatggcggcactggcgggaattgtgtttgcttcgcagattggttttatccccaaccagaccggtaccgggctggagatgaaagcaattgcagcctgcgtgctgggcggcattagtttgctcggtggttccggtgcgatcattggtgcggtactcggcgcatggttcctgacgcagatcgatagcgtactggtgctgttgcgcattccggcatggtggaatgattttatcgcgggtctggttctgctggcggtgctggtgtttgatggacgcctgcgttgtgcgctggaacgtaatctacggcggcaaaaatatgcccgctttatgacgccaccgccatccgttaaacccgcttcgtcaggtaaaaaacgggaggccgcataatgcgtattcgctacggttgggaactggctcttgccgcactgctcgttattgagattgtcgcatttggtgcaattaacccgcgaatgttagatctcaatatgttgctgttcagcaccagtgactttatctgcattggcattgtcgccctaccgctaacgatggtgattgtcagtggcgggatcgatatttcgtttggttcgaccatcggcctctgcgccattgcattgggcgtactgtttcaaagtggtgtgccgatgccgctggcgatactcctgaccttactgctcggcgcattgtgcgggctgatcaacgccggattaattatctataccaaagttaacccgctggtgattacgcttggcacgctgtatctgtttgccggaagcgctctgctgctttccggtatggccggagcgacggggtacgaaggtattggtggattcccgatggcgtttacagatttcgctaacctggatgtgctgggactccccgttccgctgattatcttcctgatatgtctcctcgttttctggctctggctgcataaaacccatgccggacgtaatgtgtttttgattgggcaaagcccgcgcgtggcgctttatagcgcgattccagttaaccgtaccttatgtgcgctctatgccatgacggggctggcgtctgcggtcgccgctgtgctgctggtatcgtattttggttcagcacgttccgatctcggtgcgtcgtttctgatgcccgccatcaccgccgtggtgcttggcggggccaatatttatggtggttccggttccattatcggcaccgccattgcggttttattagtgggatatttgcaacaaggtttgcaaatggcaggagtgccaaatcaggtgtccagcgccctttccggtgcgctacttatcgtcgttgtcgtaggtcgttccgttagcctgcatcgccagcaaattaaagagtggctggcgcgtcgggccaataacccattgccataaaggatatcttcatgacacttcatcgctttaagaaaatcgccttacttagcgctcttggcattgccgcaatctctatgaatgtgcaggccgcagagcgtattgcatttattcccaaactggttggcgtgggattttttaccagcggtggcaacggcgcacaacaagcgggtaaagagctgggcgttgatgtgacctacgacgggccgacagaacccagtgtttctggtcaggtacagttgattaataacttcgtcaatcaaggttataacgccattatcgtttctgcggtttcgcctgatggcttgtgtccggcactgaaacgcgccatgcaacgtggtgtgagagtgctgacctgggactctgatactaaaccggagtgccgctcttactacattaatcagggaacgcccgcccagttaggaggtatgttggtggatatggcggcgcgtcaggtgaataaagacaaagccaaagtcgcgtttttctactcaagccccaccgttacggaccaaaaccagtgggtgaaagaagcgaaagcgaaaatcgccaaagagcatccaggctgggaaattgtcactacgcagtttggctataacgatgccactaaatcgttacaaaccgcagaaggaatattaaaagcgtatagcgatctcgacgccattatcgcccccgatgccaacgccctgcccgctgccgcacaagccgcagaaaacttgaaaaatgacaaagtagcgattgtcggattcagtacgccaaatgtgatgcgcccgtatgtagagcgcggcacggtgaaagaatttggcctgtgggatgtggttcagcaaggcaaaatttcagtgtatgtcgcggatgcattattgaaaaaaggatcaatgaaaacgggcgacaagctggatatcaagggcgtaggtcaggttgaagtctcgccaaacagcgttcagggctatgactacgaagcggatggtaatggcatcgtactgttaccggagcgcgtgatattcaacaaagagaatatcggcaaatacgatttctgatgtgcattacttaaccggagtaagttatggcagatttagacgatattaaagatggtaaagattttcgtaccgatcaaccgcaaaaaaatatcccttttaccctgaaaggttgcggtgcgctggattggggaatgcagtcacgcttatcgcggatatttaatccgaaaacgggtaaaaccgtgatgctggcttttgaccatggttattttcagggaccgactaccggacttgaacgcattgatataaatatcgccccgctgtttgaacatgccgatgtattaatgtgtacgcgcggcattttgcgcagcgtagttccccctgcgaccaataggccggtggtactgcgggcgtcaggtgcgaactctattctggcggaattaagtaatgaagccgtggcgttatcgatggatgacgccgtgcgcctgaacagttgcgcggtggcggcgcaggtttatatcggcagcgaatatgaacatcagtcgatcaaaaatattattcagctggttgatgccggaatgaaagtgggaatgccgaccatggccgtgactggcgtgggcaaagatatggtgcgcgatcagcgttatttctcgctcgcgactcgaatcgccgctgaaatgggggcgcaaattatcaaaacctattatgtcgaaaaaggttttgaacggattgttgccggatgtccggtacccattgttattgctggcggtaaaaaattaccggagcgcgaggcgctggaaatgtgctggcaggctatcgatcagggcgcttctggtgtggatatggggcgtaatattttccagtctgaccatccggtggcgatgatgaaagccgtacaggcggtggttcaccataacgaaacggctgatcgggcatatgaactctatctgagtgaaaaacagtaactgcggatctaaggagaagaattatgcacgtcacactggttgaaattaacgttcatgaagacaaggttgacgagtttatcgaagtttttcgccagaaccacctgggctctgtacaggaagaaggcaatttgcgcttcgatgtcttacaggacccggaagtgaattcgcgcttttatatctacgaagcctataaagatgaagacgcagtggcgttccataaaaccacgccccactacaaaacctgtgtcgcgaaactggaatctttaatgaccgggccgcgtaaaaaacgtctgttcaatggtttgatgccgtgaggcgaatttatcaattttatctacaattggggtaacgcgctgacgggagtaaaaaaatgtctgactggaacccctctttatatctacacttttccgctgaacgatcgcgtccggcggtggagctgcttgccagagtgccgctggaaaatgtcgaatatgttgccgatcttggctgtggcccaggtaacagcaccgcccttctacaacaacgttggcctgcggccaggataacaggcatcgactcgtctccggcgatgattgctgaagcgcgcagtgctttgccagactgccagttcgtggaagcagacatccgcaactggcaaccggtacaggcactcgatctgatttttgctaatgcctcactgcaatggctgcccgaccactacgaattgtttcctcatctggtttctttacttaatccgcagggcgtgctggcagtacagatgccagataactggctggagccgacccatgtgctcatgcgcgaagttgcctgggaacaaaactacccggatcgcgggcgtgagccgttggctggcgttcatgcttactacgatattttgagcgaagccggatgtgaggtcgatatctggcgaaccacctactatcaccagatgccgtcacaccaggcgattatcgattgggtgactgccactggattacgtccgtggttacaggatctgaccgagagcgaacagcagctttttcttaagcgctaccatcagatgctggaagagcagtatccactgcaagagaacggacagatactgctggcatttccgcgtctgtttattgttgcccggcgtatggagtaaatatcacgtcagctggtaatgacgatcgggaagaatttttgctggaatttcggcttcatcgttcatctgtaacaggtcaatttcaatagcgttgcagatggcatccagtggtaaatcattgttttcagtaccgaacggatcttccagttcttccgccagacaatccagcgaaataaaagtgtaggaaatcagcacagagataaaaggcgtcatgtaatgcaggtccacgaccagcgcgaacggcagcatgatacaaaacagataaacggtacgatgcaaaatcagggtgtaggcaaagggaattggcgtataggcaatgcgctcgcatcctgccaggaccgctgaaatatcattaagccgatcgttgaggctaataaacaggatatctgaaagctgtccattgcggcgctgaaccgccaaccattctcccattattaacaagatacggttagctggagagttcgaagccagtacacgctgaagatcttcagtcttgagataatgagccagcacttccgcctgtggctgtttgcgtaatgtcatgcgtaaacagtgggcgaaagcgatttgcagccgggcaaactcccttacacttgccgaatccggcaatgtcgtttttacctcgcgcagtaacgaccgtgaggcaatcatcaactgcccccaaagttttcgcgcttcaacgtaacgggcgtacccggcattattacgaaaaccaagaaaaatggcgatggcgacaccgagaatgctgaacggtgcgagggtgaatttgatgcccagatgcgtgtaccagggcagcatgaaaataacagcgatagaaaagagaaaattgagtagtaagcgcgaggatatcttggataatactgagccgtgccagacaaaaatacggcgcagccagtgttgttgtggacgaacaatcatggttatcttcaggcgtggaaaagtcgccctattaaacgtgattacgatcacattctcaagacgctacttacaaattacctacaagcttacaacattagcaggcgctgcatgtggcacctgttaatgataaaggcatataggatgttgtaactaatatggtgaaataagaaacccggtcgaaaccgggttcagaagtaacggtgttattagcacaacggacgtacagcttcgcgcatccctttttcgagaatcgcatccaggtcattagcaacctgctcgaccagaccaggcacttgcgtcaggtcctgctcccagtggtctttttctgccaaaacaatcgctaccagttcctgggtgccgataacacggtcacgatgctggctccagagttgctgataacgttccagccagtgtgcatcgtcctgtaccggatatgtttcgccgttacgctcaccacgatagaacgcaatcaatgccgctaatgcgaaagtaaggcgcgccggaagtgtgccgtttgccttctgccctgccagcagctgtggcaggatgcgggtgcggaacttggtcataccgttgagcgcgatagacagcagctgatgcttaatgtacgggttacggaaacgcccggtgactgcactggcgaaagattccagttcatcacgaggcaaatccagtaccggaataatttcttcgtagatagctttttcaacgaatgcgcaaatttcagcatcgttcatcgcttcacctacggtatccagccctgcctggaacgccaccggcaccagcgcggtgtgcgcaccgttgaggattgccactttgcgttctttgtacggtttaatatcgtcaacaatcagcacgttgagcggatatttgtccagacgcagttcagtcgctaaggatttcggtccctgaatcacaaacaggtaaaagtgttcagcggtgtcgagaaaaccatcgtgataacccagttcttcttccagtttagccacttcatcgcgcggataaccggtaacgatacggtccaccagcgtagaacagaagctgttagcctgatccagccattgaataaatgcttctggcagtgcccactcttgcgcatagcgcagcaccagttcacgcaacgcgtcgccattgtagtcaatcaactcacacggaatgatgatccaacctttatccagcgcaccgttgaaatggctaaagcgttcgaacagcagacgggtcagttttgccggatagcttaccgctggcgcgtcatcgaatttatcgcccgcatggtagctgatacccgcttcggtggtgttagagaaaacaaagcgcatttccgggttgtgcgccagtttcaggaattcatcgtattcactgtagacgctgatttcacgattaaccgagcgaatcagacgcgcgtcgctgaccgcttcccccttctcattcaggccacggataatggtggtgtacagaccatcctgcgtgctcagtgacggcgggaatgaagtttcaatcggacgaacaacgaccacgccagaattcagatcggtgtgctcattcaggagatcgatttgccagtcaacaaaggcgcgcaggaagttaccttcaccaaactgaatgatacgttctggatactgtgcaccgggaaaatcgcgacgatttagtgttttcacaatgggttcccttctgattagtcatacaacctgtttgaattggtacgacaggttagcaaactttaatacgccgaacccctgttttgatcaactcctgatgattaatgagcagttttatgagaaaagtgtggcgcggatcatggtttaatcgaggaaaaacgccttttcctggatcataaagtggtagaacacattgcattcaaatcgcgcgtaatgaataaagatgtcagacaacttcctcaccgtaacgcatagtgctggtacggttgcgcccatctttcttcgagcgatacagacacgtatcggcttcgaccatcaatttattaaagtcatcggtcagcgttaggtacgatgcgcgaccactaccgacgccaatacttaccgtgagataaagcgttttttgttgccaggtgaatggttgcagttcaacgcctttacggattttttccgccattagcagaccatcgacaggattcaccgacggcactgcaacagcaaattcttcgccgcccattcgcgccaccagccccttatcaccgacaatcttctgaatatgccgggcaaacacgcttaacactttatcgccacattcatgtccatagttatcgttaatgcttttgaaatagtcgatatcaagcagcatgacagtcagatgttgtgtctgtttcagcgatggacttttcagcgcctcataaagaccggaccgtgagtaaacctgagtcagaaaatcaaagtcggctcgcagcgcaacttgcttcattagcgaattgatcgctgccacgctaaaagaaaccataattgggcatatcgccatcgtggcaataccgagacgtgcggagaacatttgcggaatggagaacggcgaaccgaccgagatatcaatcaccgaatttgccaccagtacgatttccaccgcaccggtgacaaaggtcaacagacatgttacctgcggcgtatagcgcactgcacaccagattaatgcaggcagcgggaacgccagactccccgctccgccaatgactaccgaggcaataaccgacacaataagcgcgatggcgggcatcatctgttctgctttaaagcgcggcagcactccaggaatagccaacgtcagcatacaaggcacgatcaacacgcccgttgagaattgctcactgaaccagtccgcaagcaaaggccagaaatccagactatcaatactgaccgaaccaagatagcatgttcgctgacagcggcggcaaataaaggtaccctgggaatgctattttgtcgttttccgcaattctcatggctgattcatctgtacaaccagccagtgatagattaccgccacgatataacgttgttgttcttcgcttaacgaaacaccctgcggaatgttatgccacttagccagacaaccgcgacagcaggtcgcggtggcgtgctgagcgataaacaccggatgcccgcgcatgggggtttgcttaccgtcattagccggtaatgccggagcaagacgtttagcgacaaaatccgccgcatgttgttcgatgactggcgcgcctttctccaggcaatactgacgctctttcatgcccagacgaaagcgagagcgaaattttgaacgggataaacgcgcgaagagtggatcgagagactgcattaataaaccgaacgccctaactgtttcgtcaattgttcaagaacggcaatacccgcaagcgagttacctgcatcatccagttccggactccagacagcgatggccatttcatgcggaacaatcgccacaataccgccaccaacgccagatttcgccggtagccccacccgccaggcaaactcccccgcgttctggtacataccactggtcgccatcagcgcgttaatttgccgcgcctgcattggcgtcaccactggttcatcaatatgaatagctttcccctgattagccagaaagacaaacgtccgggccagctctacacagctcattttcagagcgcagtaatgaaagtagttttgcagaacggttgtcacgtcatgatggaaattgccaaacgacttcatcagccaggcgatagccgcatttcgcgcggaatgttcaaattcggaacgcgctaccaccgtatcgtaggaaatatcagacacaccgcttaagccgcgcacgacttccagcatacgttgccgtggtgcgcttaatcgcccttgcaacatatcgcagaccaccagcgcaccggcattaatgaacggattacgcggtataccctgctccatttccagttgcactaaggaattgaacggtgatccagacggatctttgccgacgcgttgccagatttcctcttcggagtaatgacgcatggcgacaacgagactcagcactttggaaatagactgaatggaaaaacgttcttgcgcgtctccggcctgaaaaagctgtccgtcaacggtacagatagcaatccccaatcgggaaccgtctactgtagccagcgccggaatataatccgcgactttaccctgaccaatgagcggccgcacttgccgcaagatgttttctaaaattgcattatccatggcgactgccactttctactcctggaccgcaggtctgaaaagacctgcgagtatatcagagctgaatatgtcgcgtcagatccggtctttccacaccgtctggatattacagaattcgtgtaagccgaaatgggaaagctcacgaccaaagccactctttttcacgccaccaaaggccactcgcgcgtcgctggcacaataaccattgataaacaccccaccgcattccagacgtgccgccatctgtctggcctgtgtttcgtcagtggtaaaaatggtcgctgaaaggccgaactcactatcattagccagttccagtgcatgttctgcatctttcgcaatggtgattgccgcaacggggccaaacatttcttcccgaaacgcggtcatttctggggtaacattcgccagaaccgttggcggatagtagttacctgccccagccatcttttccccgcccagtaacaaacgcgcaccctgcgccagggttttctccacctgatgatgcagctcatcacgtaaatcaaaacgagccattggtccgagagcgttctcttcgtcacggggatcgcccattttcaaggctgccgcagctgccacaaaacgttcggtaaatgccgaagcaattccctcttcgataataaagcgttttgccgctgcacatacctgtccggtattctgataacgtccggctaccgccgctttcaccgccagttccagatcggcatcgttaagcacaataaacggatccgaaccgcccagttccagtacgcattttttcagtgccgctccagcctgtgcgccaatagccgctcccgcacgaacacttccggtcaccgtgacagcagcaatgcgcgagtctttaatcatctgactgacaccgtcgttgtcggcattcagccagccatatacgccttgtgggatacccgcatctttaaacacctgggcaatgagctgtgcacagcccatcacattcggcgcatgtttaagtaagtagccgttacctgcaagaatgatgggaacagcgccacgcatcacctgccataacggaaaattccacggcataatcgccagaatcgtccccaacggtcgatactcaataaccgcctgctgattttccaccagcgtaggttccgccttcagcattgccggaccatgttctgcataccagtcacacaaattcgccgatttcgccacttcagcgcgcgcctggttgattggtttgcccatttcgcgggtgatcatttgcgccatttcttcgctacgagcgcgcagagccttaccgatatcacgcagtttttcagcacgataatctatatttgtctcgcgccagtcgcgaaagcctgctgccgccagctgaagtgcgttttcgatatcgtcagcgccagcccacggcagcacagaaagttgttcacccgtggcaggatttatcgaaattgcatgagttgccggagtaatggtcatcggggtatctcctttatgagtcatggtatgaagatacgcagatttactcttgctttaaaatgaataatattaagccacttattcacgaatcgagaatgctatggatctgacccaactggagatgttcaacgcggttgccgaagctggcagcataacccaggctgcagcaaaagtgcatcgcgtgccgtcgaatctcactacccgtctgcgccagctggaaacagaactgggggttgatctgtttattcgcgagaatcagcgtttacgtctctctcctgccgggcataactttttacgctatagccaacaaattctcgcgttagtggatgaagcgcggagcgttgtcgctggcgatgagccgcaaggtttattttctcttggttcgctggaaagcaccgctgcagtgcgcattccagccacgctggcggaattcaaccgtcgttatcccaaaattcagttttcactttccaccggcccttccggcactatgctggatggtgtactggagggaaaactgaatgcggcgtttattgatggacccattaaccatactgccatcgacgggataccggtataccgcgaggaactgatgatcgtcacgccacaaggatatgcgccagtaacccgtgccagtcaggttaatggcagtaacatttatgccttccgcgccaattgttcgtatcgtcgccacttcgagagctggtttcatgctgacggtgccgctccgggaactatccatgagatggagtcttatcacggaatgttggcctgtgtgatcgcaggagcaggcattgcgcttattccgcgctctatgctggaaagtatgccggggcatcaccaggttgaagcgtggccgttagctgagcaatggcgttggttaacaacctggctggtctggcgtcgtggtgcgaaaacacgtccgctcgaggcatttattcaactgctggatgtgcctgactcggcaagacagggatatcaatgagctatttttgatagttcttgcggttaatatgctctatatagtgatgttccgatgacttatgactatatggggcaaatatggttacgccagtaagcatcagcaattacatatctcttcctgatgattttcccgtacgtaatattgcaccgcaggtaaaagaagttttaaaggattttattgatgcacttagtacaataatatgtaatgaagagtggcgcacgtctttaaacatcaactcagccacaaaaaagatatttaataaccttgacaacttatcatatattcagaggacttcttttcggggtaacgacacgctatacaatgaaaaggttcagtttaaactcacttatcccgccaggaatggaagacacaaagaaaatattgaatttcaggtagtaataaatttaagccctatttatttagataattttcgccatgatggagaaattaatattttttgcgctcccaacccaaagcctgtcactatggggcgcgtatttcagaccggcgtcgagcgtgtactctttctgtttctgaatgattttattgaacaatttccaatgatcaaccctggtgttcccatcaaaagagcgcatacaccacatattgaacccctgccttcggatcaccataccgctgcagattacttacgccagtttgatttgcttgtcctgaattttatctctcgcggtaattttgtcatactcccccgattatggaataactctgaggttcacagatggttcgtcaataaagatcctaacttgatcaccgccattctcgacataacggacagcgaattaaaagaggatttgttgcaaagcctgatggattcattaggttctaacaaacatgtactacccgaagtctgcatctgctttttatcccttttagcagaacaagaatctcctcattttcagaacttgtttttatttttcgccaatatgttattgcactatcaccaatttatgaatcccaatgaaagtgatttgaatgacgtgttgatgccagcatcattaagtgatgataaaattatcaaacatatggcgcgcaggaccctcaaactgtttgtaaaaaatgaaacaccgccaaaagttactcacgaagacctggtgaaaaacaggcctcgctcccctgtcagaccacctatacccgcaaccgccaaaacgccagacctccctgaacgtcattaaaccgtgatgttaccgactctctgacgcgtgaaagaatcagcgtcagagaaacggaaaacgcgatccagatcacaaatgcattgtattcacatcattaaccgttttaagatcatttcatcactttttcgcaactcacccgataatctgttatgacaacaaacactgtttcccgcaaagtggcgtggctacgggtcgttacgctggcagtcgccgccttcatcttcaacaccaccgaatttgtccctgttggcctgctctctgacattgcgcaaagttttcacatgcaaaccgctcaggtcggcatcatgttgaccatttacgcatgggtagtagcgctaatgtcattgccttttatgttaatgaccagtcaggttgaacggcgcaaattactgatctgcctgtttgtggtgtttattgccagccacgtactgtcgtttttgtcgtggagctttaccgttctggtgatcagtcgcattggtgtggcttttgcacatgcgattttctggtcgattacggcgtctctggcgatccgtatggctccggccgggaagcgagcacaggcattgagtttaattgccaccggtacagcactggcgatggtcttaggtttacctctcgggcgcattgtgggccagtatttcggttggcgaatgaccttcttcgcgattggtattggggcgcttatcacccttttgtgcctgattaagttacttcccttactgcccagtgagcattccggttcactgaaaagcctcccgctattgttccgccgcccggcattgatgagcatttatttgttaactgtggtggttgtcaccgcccattacacggcatacagctatatcgagccttttgtacaaaacattgcgggattcagcgccaactttgccacggcattactgttattactcggtggtgcgggcattattggcagcgtgattttcggtaaactgggtaatcagtatgcgtctgcgttggtgagtacggcgattgcgctgttgctggtgtgcctggcattgctgttacctgcggcgaacagtgaaatacacctcggggtgctgagtattttctgggggatcgcgatgatgatcatcgggcttggtatgcaggttaaagtgctggcgctggcaccagatgctaccgacgtcgcgatggcgctattctccggcatatttaatattggaatcggggcgggtgcgttggtaggtaatcaggtgagtttgcactggtcaatgtcgatgattggttatgtgggcgcggtgcctgcttttgccgcgttaatttggtcaatcattatatttcgccgctggccagtgacactcgaagaacagacgcaatagttgaaaggcccattcgggccttttttaatggtacgttttaatgatttccaggatgccgttaataataaactgcacacccatacataccagcaggaatcccatcagacgggagatcgcttcaatgccacccttgcccaccagccgcataattgcgccggagctgcgtaggcttccccacaaaataaccgccaccaggaaaaagatcagcggcggcgcaaccatcagtacccaatcagcgaaggttgaactctgacgcactgtggacgccgagctaataatcatcgctatggttcccggaccggcagtacttggcattgccagcggcacaaaggcaatattggcactgggttcatcttccagctcttccgacttgcttttcgcctccggtgaatcaatcgctttctgttgcggaaagagcatccgaaaaccgataaacgcgacgattaagccgcctgcaattcgcagaccgggaatcgaaatgccaaatgtatccatcaccagttgcccggcgtaatacgccaccatcatgatggcaaatacgtacaccgaggccatcaacgactgacgattacgttcggcactgttcatgttgcctgccaggccaagaaataacgcgacagttgttaatgggttagctaacggcagcaacaccaccagccccaggccaattgctttaaacaaatctaacattggtggttgttatcctgtgtatctgggttatcagcgaaaagtataaggggtaaacaaggataaagtgtcactctttagctagccttgcatcgcattgaacaaaacttgaaccgatttagcaaaacgtggcatcggtcaattcattcatttgacttatacttgcctgggcaatattatcccctgcaactaattacttgccagggcaactaatgtgaaaagtaccagcgatctgttcaatgaaattattccattgggtcgcttaatccatatggttaatcagaagaaagatcgcctgcttaacgagtatctgtctccgctggatattaccgcggcacagtttaaggtgctctgctctatccgctgcgcggcgtgtattactccggttgaactgaaaaaggtattgtcggtcgacctgggagcactgacccgtatgctggatcgcctggtctgtaaaggctgggtggaaaggttgccgaacccgaatgacaagcgcggcgtactggtaaaacttaccaccggcggcgcggcaatatgtgaacaatgccatcaattagttggccaggacctgcaccaagaattaacaaaaaacctgacggcggacgaagtggcaacacttgagtatttgcttaagaaagtcctgccgtaaacaaaaaagaggtatgacgatgtccagacgcaatactgacgctattaccattcatagcattttggactggatcgaggacaacctggaatcgccactgtcactggagaaagtgtcagagcgttcgggttactccaaatggcacctgcaacggatgtttaaaaaagaaaccggtcattcattaggccaatacatccgcagccgtaagatgacggaaatcgcgcaaaagctgaaggaaagtaacgagccgatactctatctggcagaacgatatggcttcgagtcgcaacaaactctgacccgaaccttcaaaaattactttgatgttccgccgcataaataccggatgaccaatatgcagggcgaatcgcgctttttacatccattaaatcattacaacagctagttgaaaacgtgacaacgtcactgaggcaatcatgaaaccactttcatccgcaatagcagctgcgcttattctcttttccgcgcagggcgttgcggaacaaaccacgcagccagttgttacttcttgtgccaatgtcgtggttgttcccccatcgcaggaacacccaccgtttgatttaaatcacatgggtactggcagtgataagtcggatgcgctcggcgtgccctattataatcaacacgctatgtagtttgttctggccccgacatctcggggcttattaacttcccacctttaccgctttacgccaccgcaagccaaatacattgatatacagcccggtcataatgagcaccgcacctaaaaattgcagacccgttaagcgttcatccaacaatagtgccgcacttgccagtcctactacgggcaccagtaacgataacggtgcaacccgccaggtttcatagcgtcccagtaacgtcccccagatcccataaccaacaattgtcgccacaaacgccagatacatcagagacaagatggtggtcatatcgatagtaaccagactgtgaatcatggttgcggaaccatcgagaatcagcgaggcaacaaagaagggaatgattgggattaaagcgctccagattaccagcgacatcaccgccggacgcgttgagtgcgacatgatctttttattgaagatgttgccacacgcccaactaaatgctgccgccagggtcaacataaagccgagcatcgccacatgctgaccgttcagactatcttcgattaacaccagtacgccaaaaatcgctaaggcgatccccgccaattgtttgccatgcagtcgctccccgaaagtaaacgcgccaagcatgatagtaaaaaacgcctgtgcctgtaacaccagcgaagccagtccagcaggcataccgaagttaatggcacaaaaaagaaaagcaaactgcgcaaaactgatggttaatccataccccagcagcaaattcagtggtactttcggtcgtgcgacaaaaaagatagccggaaaagcgaccagcataaagcgcaaaccggccagcatcagcggtggcatgttatgaagccccactttgatgaccacaaaatttagcccccatacgaccactaccagtagcgccaacaccccatcttttcgcgacattctaccgcctctgaatttcatcttttgtaagcaatcaacttagctgaatttacttttctttaacagttgattcgttagtcgccggttacgacggcattaatgcgcaaataagtcgctatacttcggatttttgccatgctatttctttacatctctaaaacaaaacataacgaaacgcactgccggacagacaaatgaacttatccctacgacgctctaccagcgcccttcttgcctcgtcgttgttattaaccatcggacgcggcgctacgctgccatttatgaccatttacttgagtcgccagtacagcctgagtgtcgatctaatcggttatgcgatgacaattgcgctcactattggcgtcgtttttagcctcggttttggtatcctggcggataagttcgacaagaaacgctatatgttactggcaattaccgccttcgccagcggttttattgccattactttagtgaataacgtgacgctggttgtgctcttttttgccctcattaactgcgcctattctgtttttgctaccgtgctgaaagcctggtttgccgacaatctttcgtccaccagcaaaacgaaaatcttctcaatcaactacaccatgctaaacattggctggaccatcggtccgccgctcggcacgctgttggtaatgcagagcatcaatctgcccttctggctggcagctatctgttccgcgtttcccatgcttttcattcaaatttgggtaaagcgcagcgagaaaatcatcgccacggaaacaggcagtgtctggtcgccgaaagttttattacaagataaagcactgttgtggtttacctgctctggttttctggcttcttttgtaagcggcgcatttgcttcatgcatttcacaatatgtgatggtgattgctgatggggattttgccgaaaaggtggtcgcggttgttcttccggtgaatgctgccatggtggttacgttgcaatattccgtgggccgccgacttaacccggctaacatccgcgcgctgatgacagcaggcaccctctgtttcgtcatcggtctggtcggttttattttttccggcaacagcctgctattgtggggtatgtcagctgcggtatttactgtcggtgaaatcatttatgcgccgggcgagtatatgttgattgaccatattgcgccgccagaaatgaaagccagctatttttccgcccagtctttaggctggcttggtgccgcgattaacccattagtgagtggcgtagtgctaaccagcctgccgccttcctcgctgtttgtcatcttagcgttggtgatcattgctgcgtgggtgctgatgttaaaagggattcgagcaagaccgtgggggcagcccgcgctttgttgatttaagtcgaacacaataaagatttaattcagccttcgtttaggttacctctgctaatatctttctcattgagatgaaaattaaggtaagcgaggaaacacaccacaccataaacggaggcaaataatgctgggtaatatgaatgtttttatggccgtactgggaataattttattttctggttttctggccgcgtatttcagccacaaatgggatgactaatgaacggagataatccctcacctaaccggccccttgttacagttgtgtacaaggggcctgatttttatgacggcgaaaaaaaaccgccagtaaaccggcggtgaatgcttgcatggatagatttgtgttttgcttttacgctaacaggcattttcctgcactgataacgaatcgttgacacagtagcatcagttttctcaatgaatgttaaacggagcttaaactcggttaatcacattttgttcgtcaataaacatgcagcgatttcttccggtttgcttaccctcatacattgcccggtccgctcttccaatgaccacatccagaggctcttcaggaaatgcgcgactcacacctgctgtcacggtaatgttgatatgcccttcagaatgtgtgatggcatggttatcgactaactggcaaattctgacacctgcacgacatgcttcttcatcattagccgctttgacaataatgataaattcttcgcccccgtagcgataaaccgtttcgtaatcacgcgtccaactggctaagtaagttgccagggtgcgtaatactacatcgccgattaaatgcccgtaggtatcattaaccaatttaaatcggtcaatatccaacaacattaaataaagattcagaggctcagcgttgcgtaactgatgatcaaaggattcatcaagaacccgacgacccggcaatcccgtcaaaacatccatattgctacggatcgtcagcaaataaattttgtaatcggttaatgccgcagtaaaagaaagcaacccctcctgaaaggcgtcgaaatgcgcgtcctgccagtgattttcaacaatagccagcattaattcccgaccacagttatgcatatgttgatgggcagaatccattagccgaacgtaaggtaattcatcgttatcgagtggccccagatgatcaatccaccgaccaaactggcacagtccataagaatggttatccgttatttctggcttactggcatctctcgcgaccacgctgtgaaacatactcaccagccactggtagtgggcatcgatagccttattgagatttaacaagatggcatcaatttccgttgtcttcttgatcattgccactcctttttcacagttccttgtgcgcgctattctaacgagagaaaagcaaaattacgtcaatattttcatagaaatccgaagttatgagtcatctctgagataacattgtgatttaaaacaaaatcagcggataaaaaagtgtttaattctgtaaattacctctgcattatcgtaaataaaaggatgacaaatagcataacccaataccctaatggcccagtagttcaggccatcaggctaatttatttttatttctgcaaatgagtgacccgaacgacggccggcgcgcttttcttatccagactgccactaatgttgatcatctggtccggctgaacttctcgtccatcaaagacggccgcaggaataacgacattaatttcaccgctcttatcgcgaaaaacgtaacggtcctctcctttgtgagaaatcaaattaccgcgtagtgaaaccgaagcgccatcgtgcatggtttttgcgaaatcaacggtcattttttttgcatcatcggttccgcgatagccatcttctattgcatgaggcggcggtggcgctgcatcctgttttaaaccgccctggtcatctgccaacgcataaggcatgacaagaaaacttgctaatacaatggcctgaaatttcatactaactccttaattgcgtttggtttgacttattaagtctggttgctatttttataattgccaaataagaatattgccaattgttataaggcatttaaaatcagccaactagctgtcaaatatacagagaatttaactcactaaagttaagaagattgaaaagtcttaaacatattttcagaataatcggatttatatgtttgaaaattattatattggacgagcatacagaaaaagcaaatcacctttacatataaaagcgtggacaaaaaacagtgaacattaatagagataaaattgtacaacttgtagataccgatactattgaaaacctgacatccgcgttgagtcaaagacttatcgcggatcaattacgcttaactaccgccgaatcatgcaccggcggtaagttggctagcgccctgtgtgcagctgaagatacacccaaattttacggtgcaggctttgttactttcaccgatcaggcaaagatgaaaatcctcagcgtaagccagcaatctcttgaacgatattctgcggtgagtgagaaagtggcagcagaaatggcaaccggtgccatagagcgtgcggatgctgatgtcagtattgccattaccggctacggcggaccggagggcggtgaagatggtacgccagcgggtaccgtctggtttgcgtggcatattaaaggccagaactacactgcggttatgcattttgctggcgactgcgaaacggtattagctttagcggtgaggtttgccctcgcccagctgctgcaattactgctataaccaggctggcctggcgatatctcaggccagccattggtggtgtttatatgttcaagccacgatgttgcagcatcggcataatcttaggtgccttaccgcgccattgtcgatacaggcgttccagatcttcgctgttacctctggaaaggatcgcctcgcgaaaacgcagcccattttcacgcgttaatccgccctgctcaacaaaccactgataaccatcatcggccaacatttgcgtccacagataagcgtaataacctgcagcatatccgccaccaaaaatatgggcgaaataactgctgcgatagcgtggcggtatagcaggaagatccatattttccgccaccagcgcccgcaattcaaaatcatcgacatcctgcattgcttcgttttcttccaggcaatgccagcgcatatcgagaagtgcggcgctaagcagttcgctcatctcataccctttgttgaacaggctggcattacgcattttctgttgcagttcgtcaggcattgctgccccgctctgataatgccgggcgtagcgagcgaatacctgcggatgcgttgcccagtgttcgttgatttgcgacggaaattcgacaaaatcacgcggcgtgttggtgccggaaagcgtggcataacgctggcgggcaaaaaggccgtgcagcgtatgaccaaattcatggaataaggttatgacatcatcccagagtaacaacgcaggctcaccggcagcgggtttctgataattgcagacgttataaattaccggatgtgttttattaagcgttgattgctcaacaaaattgcccatccatgcaccgccgctttttgaatcacgggcgaagaaatcaccgtaaaataacgccagccccacgccattatgatcaaaaatttcccacacacgaacgtcaggatggtagacaggaatatcaaaacgttcgacaaacttaataccgaagagctgattcgcggtccagaatacaccttcatttaacaccgtgtttaattcaaaatatggcttgagctgcgcctcatcaagatcaaatttctcccgccgtacctgttccgcataaaatgcccagtcccacggctgcgcgctaaacccgccctgctgcttatcgataaccgcctgtatggaggctaattcatcgctcgcacgttgacgcgccgctggaacaatttcccgcataaagttaagtgctgcttcaggtgtttttgccatctgatcggcgattttccatgcggcataatgaggaaaaccaagtagtgttgcctgttgtgcacggatctccaccagacgttgaatgatagcgcgggtatcattggcatcatttttttccgctcgcgtccagcccgcaataaacagtttttcacgcgtcgcacgatcgcgcatttcggcaagcgccggttgttgggtggtattcagcagcggaatcagccatttgttatccagacctttctcgcgagccgcctctgccgccagcgcaatctcttgctcactcattcctgccagctgcgcgatatcgttcacaaccagaccgccggatttatttgctgccagtaatcgctggttaaactggctggtcagggtcgcagcttctgtattcagtacttttaattttgctttatcagcttgcgcaagtttggctccggcaaggacaaaacgttgatgaatcacctccaccaggcggatggattcactatcaagccccagggattcacggcgctgccagacagcatctacccgcgcgaataattcaccgttcagatagatatcattagccagttccgccagttcagcggaaaactgctcgtcaagacgctgtaattcatcattggtatgcgccgcagtcatcgcaaaaaagacgctggtaacgcgggtaagtaattctccgctttgttccagtgccagaatagtattgttgaaatcaggcatttgcgggttaagcgcgatggcagcaatttctgcccgcttttgctgcattccctcatcgaatgccgggcgatagtgatgattggcaatttgatcaaaatggggagccagatacggcagtgtgctttgcacaaggaaaggattcattgttgtcattttcttctcctgaacgcgaggtgttccatagcgtaggcttactgataacggagtgcaatcttgcaatccagtattacccgctcttaagcatcccgtgctatgttattgacacacaaaagcgttgaggaacagtgagatgatcgttttagtaactggagcaacggcaggttttggtgaatgcattactcgtcgttttattcaacaagggcataaagttatcgccactggccgtcgccaggaacggttgcaggagttaaaagacgaactgggagataatctgtatatcgcccaactggacgttcgcaaccgcgccgctattgaagagatgctggcatcgcttcctgccgagtggtgcaatattgatatcctggtaaataatgccggcctggcgttgggcatggagcctgcgcataaagccagcgttgaagactgggaaacgatgattgataccaacaacaaaggcctggtatatatgacgcgcgccgtcttaccgggtatggttgaacgtaatcatggtcatattattaacattggctcaacggcaggtagctggccgtatgccggtggtaacgtttacggtgcgacgaaagcgtttgttcgtcagtttagcctgaatctgcgtacggatctgcatggtacggcggtgcgcgtcaccgacatcgaaccgggtctggtgggtggtaccgagttttccaatgtccgctttaaaggcgatgacggtaaagcagaaaaaacctatcaaaataccgttgcattgacgccagaagatgtcagcgaagccgtctggtgggtgtcaacgctgcctgctcacgtcaatatcaataccctggaaatgatgccggttacccaaagctatgccggactgaatgtccaccgtcagtaatttttatacccggcgtaactgccgggttattgcttgtcacaaaaaagtggtagactcatgcagttaactcactcacaagcaagaacgaatgaccgtcgaaacgcaacttaatcccacacagcctgtcaatcagcagatttatcgtattcttcgtcgcgacattgtccattgcctgattgctccaggcacaccgttgtcggaaaaagaagtttctgttcgtttcaatgtgtcacgccagccggttcgtgaagcctttattaaactggcggaaaacggcctgattcaaattcgtccgcaacgtggcagctacgtcaacaaaatttccatggcccaggtgcgcaacggcagttttatccgtcaggccattgagtgcgcggtggcgcgtcgggcggcgagcatgattaccgaaagccagtgctatcaactggaacaaaatcttcaccagcaacgcattgccattgagcgcaagcaactggatgatttttttgaacttgatgacaacttccatcaactcctgacgcagattgccgactgtcaactggcgtgggataccattgagaacctgaaagcgaccgttgatcgcgtgcgctatatgagtttcgaccacgtttctccaccagaaatgctgttacgccagcatcttgatattttctctgccctgcaaaaacgtgatggcgatgcggtagaacgtgcaatgacgcaacatttgcaggaaatcagcgaatccgtgcgccagatccgccaggaaaacagcgactggtttagcgaagagtaattcatttcctctcatcccatccggggtgagagtcttttcccccgccttatggctcatgcatgcatcaaaaaagatgtgagcttgatcaaaaacaaaaaatatttcactcgacaggagtatttatattgcgcccgttacgtgggcttcgactgtaaatcagaaaggagaaaacacctatgacgacctacgatcgtaaccgtaacgcaatcaccactggcagccgtgttatggttagcggcaccggtcacactggcaagatcctgtcgattgatactgaaggtctgaccgctgagcaaatccgccgcggaaaaaccgtagttgttgaaggttgtgaagagaaactggcaccactggacctgattcgtctcggcatgaactaagcgtgtgaatgccgccgatggcggcattgcttttttacttcacggaatattttgccacggtcgctttcgcgccatgcgctaataaagacaagtacgtttccgtcactcttgcagtaaacaaactattgtctggcaaatcatcaccaaagatcgccttaatcgccagcaatgactggacgcgcgctttcccttcggcactactttgtacagccttctgaataacaggtaacagtgggtcactgatttctatcggatttccctgttcatcaacaccaccgacataacgcatccaacccgcgacgcccagcgccagcagatcgaacttgctgtcatgcgccagatgccagcgaacagaatccaacatccgctgtggcaatttctggctaccatccatcgcaatctgccaggttcgatgacgtaacgccgggttgctatagcgtgcaattaatcggttagcgtaatcttgcaaatcaacgccctgcactttcaacgtcggcgcttgttcctgcaacatcaagccatacgccgcataacgataatgttcatcttccatacagtcattaatgtgctgatatcctgcaagataccccagatacgccaggaatgaatgactgccgttgagcatgcgcaacttcatctcttcataaggcagcacatcgctaaccagttcggctcccgctttttcccattccggacgtccggcaacaaagttatcttctattacccactggcggaaaggttcacaggcaacgcccgcaggatcgcgcacaccggtaagttgttcgattttcgccagcgtatcctctgtcactgcgggcacaatacggtccaccattgttgatgggaaagtcacgttatcttcgatccattgtgccagttttacatcaacggcttgtgcgtaggaagtgacaacgtcacgcataacatgaccgttttctggcatgttgtcacatgacatgacggtaaatgcgggaagtcctgccgctttacggcgagccagcgcctcaacaatcacccctgttgctgttttcggctggtggggattttgcacgtcggcagctaccatcgggtgatcgagcattaactgtccggtcgccggagagtggaaataccctttttcggtgattgtcagagagacaatcgcgatttgcggttcacacatcgctgccaacacggtttctaagccatctatctgtacgtgcaaggcttttttaacgacgccaacgacgcgagccgtccacacatcggccgacatttccgcaacggtataaagattatcttgctgttgtaaatcggcaatttgctgttcgccgccgattaagttgacctcataatatccccagtcactgaaatgttccgtagcaagaatatcggcatacacaccctgatgcgcacggtgaaatgcaccaaagcctaaatgaacaattcttggagccaggttattaagatcataaacagggagtgtcgcttttgctgataacaaattatttcccataacaattccttaaatataaatatggcaagctatatgttttgttatatgaataaaaatcccctctccggtaagagaagggattaagggtttacagacttctggaaggttgcgcagctcttacaacacgcggttgatcttccgcagcgtcttccagcgcacttaaatcacggtctttcacctctggcattttcagcgcagagattaaaccaatcactgaatatgccatgatcataatggcgatcggataccaggattccgtcatggtgcagaaaatacccgccaggataggaccaaaaccggaagcgataagaccaccaatttctttagaaatagccatccgggtaaagcggtttttacagccgaacatttctgccatggtaatgttttccagagcaaataatcccagcaccgcacagttatgaatcacaatcagtgcaaccataatggtgctcggggcatagcttttatctacaatgatagaaagcattggccatgccagcacaatcgcggaggtattcataataatatacgggatccggcgaccaattttatcggataaccaaccaaggaacggaatggtcataaagccgagaatcgaactgatcatcaatgcatctgttggaattgctttgttaaacaataacgtctgcactaaatagcctgcaaggaaagtctgaattaacccggagttacccgcctgaccaaaacgcagccctgttgccagccagaaggatttgctctggaacatgctaccagcaggtgcaggttttgctgtcggttggttactgtcgttaaccttctcaaagaccgggctttctttcagattcatacgcaaccagatagcaaagaccatcacgacaacactcgccaggaacggtatacgccatccccacgccagcagttcctctttactgagaatgaagaacataaaggcccagattgccgttgcgctcaaggttccgcagttagttcccatagccacaaatgaggagataattccgcgcttaccttttggcgcatattccgccagcatcgtaccggcaccggaaatttccgcacctgcacccaacccctgaataatacgcaacgtcaccagcaagatgggtgcaaaaacaccaatctgtgcataggtcggtaacacaccaattaaggtggtacagatccccatcatggtgatggtaataaagagcacttttttacgccctattctgtcgcccattttgccgaaaataaatgctccgacaatacgcgccacataacctgcaccgtaggttcccattgccagaattaacgccattgccgttgatgattcaggaaaaaatatttcatgaaacactaacgctgcgccgagcgaatataactggaaatccataattcacaggtgttttttcccatcctgtggtttccttggcgttttctaggttttttcagatagttgcatttttttaaaaagcatcctaagttcgatctcagtgtctatctggggcctatttctgtcccatatatgccccaaaaaaactccccaacagataagtagttttttcatggatttatgcgtaaaatcaagaacggctggaaatcattcaatactcacactatcgaaaaatttaccagccaatcgcagcacgttcttgcataaggtgtgtctgcggtttttcaactattcagatacatcactcccatcacattcattcctccgcatcaaaggcatataggctatatcaccttgatatttttctttttcagataaaaactgttatctatgtatacttttaaacccaatccgtgtagagtctctacataagatagtttgcagttgccgcttcagcttgcgccataaaccgcctgatttttgctgccacctgttagcattcctgtatacctgaaacgacaatgtttatctacgaactttaagaacacccaagataaaaattgtcaactatatcatatataacacattactaattcgaggctatatgaacagcatactgataatcacatctctccttatcatattcagcatttttagtcatgccctaataaaattagggattggcatatccaataacccagacaaaaccgatgtataagtcaacatatcctgaatcagacatacaatatcgcaatgaaaatcaataatattttaaggaatatcttcatgaaatcaaaagacaccctaaagtggttccctgcgcagcttcctgaagtaagaattatcctaggggatgctgtagtggaagtagcaaaacagggaagacctatcaataccagaacattgcttgattacattgaaggaaacataaagaaaaaatcatggctggataacaaagaattattacaaacagcgatatcagttcttaaagacaaccaaaatttaaatggtaaaatgtaatataataaacttacttttttatcatttttccactttaacaacattttgctccacttttccacgaccaaacaacttgaaatctggttaaaataacacgcaacactattcttcttccttgagtccgcccggaactcgaaaaacaaaccgagttaaagccatttttcacaaaatcgattttgggtctcaccaaaattacggggttgcatacgcattcgtttattttcgaacgtgtacatacaaatatgcacaaaaataatcataattattttctgagatgcattatgatatgaacaccaatttcgtatagagtctcactatgtctcaaatttttgcttactgtcggatatcaacgctggatcagaccaccgaaaatcaacgccgggaaatcgaaagtgcaggttttaaaatcaaacctcagcaaataatcgaagaacacattagcggctcagcagcaaccagtgagcgtcctggttttaaccggttgcttgctcgcctgaaatgtggtgatcaattgattgtgacaaaactggatcgccttggttgtaatgcaatggatatcaggaaaacagtggaacaactgaccgaaacaggtatcagagtgcattgcttagcattggggggcattgacctgaccagtccaacaggaaaaatgatgatgcaagtaatttcagcagtcgctgaatttgaacgagaccttttacttgaacgcactcattccgggatagtaagagcccgcggcgcagggaaacgttttggtcgaccacctgtgttaaatgaagaacagaaacaggcggtattcgaacgaattaagtcaggtgtaagtataagtgccattgcccgggaattcaaaacctcgcggcaaaccattttaagagccaaagcaaaacttcagacacctgacatataaaaaataatctcggtgtgagatgctttacgtcttccaagcccccttccttgccgtaaatggaaagatacatctaattatagaatttatatgttttaccctacggcagtgctggccattcaatatcctgtgcagttgacgtatcaacacggttcagcaatacccgatactttttccatgcttccagcaacgagatttcttcctccgttgcaatttccagatctgcagcatcctgaagcggcgcaatatgctcactggctacctgcatcaggttgttttttgtttcttccgcctcccggatccggaacagtttttctgcttccgtatccttcacccaggctgtgccgttccacttctgaaactccccttccggcgataaccaggtaacattttccggtaacggaccgagttcagaaataaataacgcgtcgccggaagccacgtcataaaccgttttaccccgatgatcttcaacgagatgccacgatgactcatcactgttgaaaacagccacgaagccagccggaatatctggcggtgcaatatcggtactgtttgctggcagacctgtatgaggcggaatatatgcatcaccttcaccaataaattcattagttccggccagcagattataaatttttatggtccgtggttgttcactcattctgaatgccattatgcaagcctcacaatatagttaaatgcgatgtttttgacggtgttttccgcgttaccagcagcgttaacggtgatggtgtgtccatgtgaaccaatcgcaacggagtgcgtatgagcaccaataccgacagtatgtgcatgcgcgcctgcgcttgcagcagtgccggacagcgagtgggtatgagcaccatctgatgatgtcttccctgcattacgagtctggccactaccgcttgttgtgctcataatccccgcgcttagatttgaaatcgcggtataaccattagggaaaatgctcgtgttcgtgccaccaaatgcaccggaactcttgtgttggtgcgcaccggcactatttgcggtcccgctaatactatgggtatgcgccccggtgttattcgtggatttggttccgtaatcaaacgacgatgtggtttccgtccccaaatccgtactggatgcgctggcgctgtgggtgtgcgatttaatgccgtcctgttcctgagataatacggcccgaccactggcgggcttgcccttaatcgtccagccacgcatatcagggatcacgcctgacggataagcaactgcaagtttcgggtatgcagatttgtcaaaagtctgcccctgcatcagggcataaccagacggaacggtatctgatggccacgggattggtgcaccgactggataaaactctgcaggaggatgagccgaggtgtaaagctgcgcccacggcgaccagtttgcgtcggtcgtatcccgtcgtgaacgaataaatgccggagcatgagcaccgcttgtaccactccagccgatgagtaactcaccttcgccaacggctgtcatccctttcaggtgaatgatatttccatacgctgttggatatccgttgttatacacctcgtataactcaagacctgctgccccctgcgtattgtctgtcagcgcggttatattcactcagcaaccccggtatcagttcatccagcgcggctgctttgttcatggctttgatgatatcccgtttcaggaaatcaacatgtcggttttccagttccggaaaacgccgctgcaccgacagggggatcccgtcgagaatactggcaatttcacctgcgatccgcgacagcacgaaagtacagaatgcggtttccaccacttcagcggagtctctggcatttttcagctcctgtgcgtcggcctgcgcacgcgtaagtcgatggcgttcgtactcaatagtccctggctggagatctgtctcgctggcctgccgcagttcttcaacttcccggcgcagcttttcgttctcaatttcagcatccctttcggcataccatcttataacggcggcagagtcataaagcacctcattacccttgccaccgcctcgcagaacgggcattccctgttcctgccagttctgaatggtacggatactcgcaccgaaaatgtcagccagctgctttttgttgacttccattgttcattccacggccaaaaacagagaaaggaaacgacagaggcccaaaagctcgttttcagcacctgtcgtttcctttcttttcagggggtattttaaataaaaacattaagttacgacgaagaagaacggaaatgccttaaaccggaaaattttcataaatagcgaaaacccgcgaggtcgccgccccgtaacctgtcggatcaccggaaaggacccgtaaagtgataatgattatcatctacatatcacaacgtgcgtggaggccatcaaaccacgtcaaataatcaattatgacgcaggtatcgtattaattgatctgcatcaacttaacgtaaaaacaacttcagacaatacaaatcagcgacactgaatacggggcaacctcatgtcaacgaagaacagaacccgcagaacaacaacccgcaacatccgctttcctaaccaaatgattgaacaaattaacatcgctcttgagcaaaaagggtccgggaatttctcagcctgggtcattgaagcctgccgccggagactgtgctcagaaaaaagagtttcttctgaagcaaacaaagaaaagagtgacattactgaattgctcagaaaacaggtcagaccagattgaagcaatttagataatcgtgcagactacgccccctcatatcacatggaaggtttatctatggatcaggtagtcatttttaaacaaatatttgataaagttcgaaacgatttaaactatcaatggttttattctgagctaaaacgtcacaatgtctcacattacatttactatttagccacagagaatgttcatattgtattaaaaaatgataatacagtgttattaaagggcctaaaaaacattgtgtctgtcaaattttcaaaggataggcatcttatagaaacgacctctaataagctgaaatccagagagatcacatttcaggaatacagaagaaaccttgctaaagcaggagtttttcggtgggttacaaatatccacgaacaaaaaagatattactatacctttgataattcattactatttactgaaagcatccagaaaactacacagatcttaccacgctaaaccataacgtccggcttctctcactcctgagccggactgcattggtttaataaaaaccatcaacaattgtgatttagatattcggaaccattcaaatataacaaaaccccgtaaaaacgaggtttatggataaattttattattgaatacatcagattaaattaatcttgacatcatagctttcaagacccgtcattttttcccgtgcggtaaactgaatactggtaacttctttcccggtctttttcttaagttcaataattttttttgttatatattcagaaatatctgcttctgcttttgtttttaagttttcaatattcatcatttcctcttttagtctgttatgactttccagttacacagtaagtcgattatatggtgcaaacgtgtaaaagataagatgaaacatcgcaataatcaacatacgatagtctaaattttacacaaacagacaaagagaattttcctgaattatcaatgcaatagcatcaaatcaactcaagagccttattgctgcttccagaatttcttctgaagtaacatgtcgatccgcggctacataaatgactttatgatctccggtcagagatggaaaccctgcggccattacagtaaggtgtgttttttcgccatttggatattcacgcatgatggtgttaactccagtcatcgctggcactaccactgctggttcagagttaaaaaaactatgatttttttcatgatgttaccgtagtatgtgagtatccatcgaatagacaccaagcaaaaaagctcccgaaggagccttcattttcacttttttaaatccaacgacagacggctggcatttaagtattgtgaaatattatcaaatgtaatcatcattgatttacaaaagatacattttgccccgaaaggattcatgtcagaaacatcaaaagatgatgttctatactgggaaccatgacaacacgggcatctaaagtgaatatggtttgtaatattgtctacctcaaagcgccactacatgaacagcggcaggacctttaggtccgttctcaataccaaattcaacttcctgattctcagttaatgttttgaaatcgttgctctgaattgctgagaaatggacaaacacatctttgctgccatctttcggcgtgatgaaaccaaaacctttttcagggttaaaccatttcactaaaccagtcattttgttagacataattattaccttttgaagaaattagcccttgggcagaatggtccgaaaaaaaatatcagagagaaaaaccaacaaggaaatctcaagaggtacaaataataaaattataacaatgactgcttcagataaatttgtaacaaaccagaacaccattaacgcatgattaaccacccatagcaaggattacttttgtaaagaaaaacacagcaatgaaagaatagctttatttattaataaaacgtgtcattctgattaagaccttttatcttacccttaagatttcaggaattttggctcatggaagagtcctttttatttaaattttacattccgcgatgtaaatgttccgatttaatattaccctacatttgatgctttttatctcttaaagattcatagatctgttgacaagtcactcctgcgatgtagcgttcgtcagcaatttcagcataaagctgagcttctgctgcaatatctccgagcatgttggtgagcattccttcggcggttttggttgttttgcctctgacggcagcggcaagatctgcggtatgcttcgctgcgtcaaggcgtatggcatatttttttgcttcggcacgcaactggttaacactatcagacagataagcagccctggcagaaatttcagcagatttctgttgcgcatctttaacagcctcatcacgggctatagttcgcccctgttcaattattcgagcagcaaattgagcatttacctcttgtgataatgcggcagcatcacgttccgcccattttttttgccatcctcggtcgctccagacatttccgacgataaatcctgacaacacgagaaaaatcaccatgaatatctgattcactgttctatcccccagcaggttaatgcgctctcctggtcacgacgaataacctgaccgtaacagttatttgaacgaatgcggcaatcgcgtccgccatccttaatccaccagcgaatcgcttcgcatgcacctttacgatcaccagcattcagccgcttataaaacgtcgacgggaaacacttaccggggccaatgttatagggacaaaatgacgcgatacccgctttttgtggttcggtcagtggtactttaatattgcgctccacccatgccagcgccttatcacgctcaatggcgttgacctggtcgcatttttccttcgacagtttcatattgggaaaaacggtttttccatccaccactgtggcaccccgacagatggtccatatgccagaaccatcgcggtatgccattgtgtggttaccttctttttcgtccagaaactggtcaagtatctgaggagcagatgcgccagcaccaatcagcgccagaacggcagccgacaggccgtatctgatttttgtgttcatagatatttatgatgaggacgctcgtgcttattggcaggattttcaatcttaaaggagtactgatgctgcagataagactcaactttttctgacaatttttctgctacttccaggaagacttgccggacgctccttctggctgctgcctcataaaactccagcgcagctccttcaacacggtccatggcgacatccaggtcaaaaatttcaccgtcaaagcgttctttgtcctgtaaggctacagttaccgtaactttattctcaaaattacggactcctttcacaaccagttcatagtcttgagtcattggattactctcctctcgcagccttacgcctgtcttctttaatcttgaaataaagatttgtcagatacgtcagcaggccaaaaaccaggctacccagcacaccgattgcagcccactgtgacggagttactttatcgagtaactgcaatgcccagaaaccagcattacccgccgatgtgccataggcaacacctgttgttaacttatccattgatttcatatcctcaccccgatgtacacggatggtgcaatatgtttgaaaagatcggagtctacggggtagttttgacagcacacgttgttctcaacggcgctaaaaaaacatacacattaaaaatgtgggtaattattttgaaagaaagtcatatataaaataataatacgagaaatgttttcatatttagtgtactgtatacggccatttatacaggaaaagcctatgtcagaacgtaaaaactcaaaatcacgccgtaattatctcgttaaatgttcctgcccaaactgcacccaagagtcagaacacagtttttcaagagtacaaaaaggtgcccttttgatctgccctcattgcaacaaagtattccagacaaatcttaaagctgtagcctgattgattttattagtaacaagtattttttatattttaataatatatttaaagcagataataaaaaacccgcctgagcgggtttgagattgtggtgctttttgtgggagtcatccacttacgcactttgttttgccatgccagcagttagcttctgctgtaaaactattcatgcagcaaacctgcacttcaccacaatggttagcatacttttcctgattaagattttgccaaatatgctagccattgtttcatgtattggacctccttactttttattaaagagatccaatattcactactctgtccgtatctctactcaggcatcagccttcttcgttatcgtatacagacgagcgatgaattttaatcagtaatgatgacatttgctgctgcaggacctttagcaccactctctatagagaaggtaaccttttgaccttcaaataaggttcgataattatcattctgaatcgcagaaaaatgcacaaacacatctttactaccatcaacaggagaaataaagccgaaacctttatcagcgttaaaccattttactaaaccagtcattttatttgacattctacattccttaacttgagcctttcggcataaatggtttgcataacagaaacgacttcgtacttaattggagagactcaaagaaggaataagtgaataacacctgaaatgagaactgctttagtaaactacttcgtatatcgtctgttcttcaaaccgacgcaatcattaacgcatagttgaacatatgaagcaatgtttattttagacatccagccatcttcaaccccatcaaaaaactatagctttcttcaggaacgtgtgtatagtgcgccaagttatcagtattaaggaatttttttgtcccgtaaaatgacaggaattgtcaaaacctttgacggcaaaagcggcaagggtcttatcaccccatccgatggtcgtatcgatgtccagcttcatgtttcagcgctcaatctccgcgatgcagaagaaattaccaccggattacgcgtggaattttgccggataaatggtctgcgtggcccttcagctgccaatgtttacctttcatgagctatattaaagctttaatttcaggccccatcggatcacacatggagagtttttatgaataaccccgtctgtcttgatgactggttgattggctttaaaagcttatgctgtactttggccgtaatagctctgctaataatataataagcagactcattgtgtttagggacattgtactggaagaaaacattttaaacatcaggcaaataaccaagtcaccagctaaataataagttaacagacatgagtcccgggatgagattcaacattaccattgccccatttaaagcacaaaacccgctcatcagcgggttttctactttttcttaacgtcgggtatacaaagcccatcgttgaaaaaattttatccatattttttgaaaaatgcaaacatcatgtcgccatcttcagcaaaaatcatttatctcgtcaccttcctcaattgcgcttccgcgtatgcttcttcctgccagcactttgttaccagtttaccaatgacgtccgcataccccttataccactgataatcggtcaggtctggtaccagcttctggacatgacgtcgtgccagcgtggtcggtaaacgactaaaccggtttccattacaacgcccacaaatcttatataccggtacgccatgaaaccgggttcttttttcatccagaacaatccctttacccttacaccctctgcacgctgtgctggcttcgcccttaccatggcaatgctgacatagttccttcacccattcttccttgattacagattccccgcgtctgtagtgtttcaccacttcgcgcaatacattataaaatcccgtacctgaacaatgctcacagcgagccttacttgccgcagacctggagtaatcagcaaaggcaaaactcacgaggtaaggaataatctgtaaccggatttcttcactcaatttgttcaatgtcgggttatccagtgccatcgcgtaatttagcaggccttcaatcgcaaactgagggtcctgaacaccaacttttgccagaaataaggccaacccaagtggtgctttcgactgcaccatcccctgcgctgccattacatccgtaattgttaaacaaccggtgcctgtcgctggagcgtcatcgctcaattttggagattttggggagtaatattttggtaaggcttcaaggttcatgctcgttctccacttacgccagtacgccaattgccagcgcgcgatcgataaaacgaaatatcagctccagttgggagccatacttatcttcaaatgccactgtatccgtatgcagctcgttgtgatgctttctgcacaaaggcaacacaaagagatcatgtgcttttgttcccattccgccctgcccgtgaccaatcagatgatgcggatcgtcggctggcataccgcagcaagcacacggctgtgtcttaacccaacgtgtgtatttctccttaacccagcggcgacgtttaggcagcttcatgaaagattccggagactctggatcaacggtgatgcttaccaccgtcttttcctgtggtgatttttgttgctggtgggcgtaaggcaacggtgcaagattttttgtgcgttgtttcaatatgctggtggcggtcagctctcccggtacgatgtcgctttcgcggtacaccgagcagattttttccgctggtaatcccagcgaacgacgcgatacagcctcaggtagtgcatccaccacctgattgcagaccgcccaccaggataattcagccaaagataattcccgctcctgcgtaccgcttattgcgtgacggatgacgtcaatcacccatgctgtcagattttgttgagcaagcagctccagtgattccgatgtctggtcacgcagttggttgtcgcagtgccagcacaacaccattgcgccggtaccataacggtgaatgactgtttcagtgtgatggtaatcgccattaggccactggcaggatgtaacatgacgtaatagccagtcggacaatgcgccaacgccgccagcagcacgaatcacccgttcgttactaaaaaacggcagcaatgttttgtcttccgccagcggctggcgaacggcaggaacgactccggatggcagattacgcatgctttttggttccggttccaccagcactcgaggattatgaaatatctgtatggattcacggcccggcttaaggaccaccagcccaagctcaggcaccagaacaggtctaagtaatacccgcacgttacctccagatccgttgctggaaagtgcgggacgcacgtggtgggcgttcggaataaggcagcctgacagagattatccagtgccgatagtcgagactgagagctttcttaacctcgaacccgcgcctgcggtaagaatgaatcagccattcggcctgttctgcagtgcatggagggtgctggaaccattcagacttgaatgcgtgagaataccgcccgtgcgtgcaggcaagaacgggcgaattatcagaattgtaatattttgcgttgcgtgccatcggttttctccggtggcacggtgttactcagcgggagttcagccccgcgcaagattgtagatgagtttattctcctgaaaaagcagaaaagccagcttttattccgatctctttcaatgcctgtaatgaagtgacaaactcaccttcgcgcaagataaatccgtccgtgacccgagcatccacaaaattaattaacgcagccccattctttcgcaaacacataatgcggtaatgactaacaagatttccattttcaacgcacacagcatagaggccatcttcacaaaaaattttacgcagttcttcgatgttcatcatcagaatccttccggataattagctctcccctttaagggaccatccctcttatccctgcgcgctacttaagtatttttgattctattccggcaccgtccagaacttcaaacgcgttgaaaataaaaacaaaaacccgccgaagcgggttaagtgcgggtgcgttgaggatgcctgccacatcagaggtggcgagggatttctcccccgccgggtctcttactcctcaggttcgtaagctgtgaagacagcgacctccgtctggccggttcggattcgtacctcgcagaggtctttcctcgttaccagtgccgtcactatgacggttaaacagatgacgatcagggcgattaacatcgccttttgctgcttcatagcctgcttctcctgtcaacgcaaagcagaagtgtcaccttcggtgcgaaacagagatgtcatgctttggttcagagaatgcgtttgaccgcctcgctatatacttccgagcgttctcttttcccaacagaaatcacgaaaacgacaactttctcgtctataacctggtatacaaggcgatagcctgaagaccggagcttaatcttgtaacaatcaggcataccacggagcttgtttgcttcaatccggggtgactcaagtacttcaaccagcttctttttcaactgttcacgtaccgtcgagcccagctttcgccattcctttagtgcccgctcgtcaaaatccagaaaatacgccatcagagttcatccagcgtcacacgtactggcttaggattacgaagccgttctttcactatctccacaagttcagcatcttcatcactcaggagtgtctgtttgaacggcaagcgttcattgtcagcgatatactcgagcatgagacgaagcgcttcagaaggagttacacccattttttcaagcgcggcgtaagaacgcgctttaagttcatcgtcaatacgcaggttaatgctacccatgtcttacacctcttgtaattacaaatgtcattacaagtatcgcactacaacatgcttagggcaagtcacgaaggaagtcagaaagtagtcgtaagaacggtgatcactgtccgctttgtgccaggagcagccattgctaagtccatcctgtattgtgcaggtcagctcgtttttaaagagtccggccatcatcttactggtacagacaccatatactttgtgacggtcaggctacatatgcacaactcaacttattcatctattttttgctttagcatgtcagtgttgctttctcgtcggcgggtgagcggtgacctgacctgtcgataaaggaacgtaacacgttttatgcaacacccgcatgcggcagaaaattattgccgaacgtttacccctgtcaacaagctttactttctgaggcgcgccagcccgcgaggaaaacaatctgaacatcaaacaattaatgacacaagaaatacgattaaagatttttttgtgcatgccgatagtgcttttttaaaaggagaaatctatgtctgtcacaattcagggaaatacctcaaccgttatttcaaacaactccgccccggaaggaacatcagaaatagccaaaatcacaagacaaattcaggtgctgactgaaaagcttgggaaaatctcatcggaagaggggatgacgacacagcagaaaaaagaaatggctgcattggtacagaagcaaattgaaagcctctgggctcaactggagcagttgttaaggcagcaggcagagaaaaagaatgaagacgcgacagttcagcctgataaaaaagaagagaaaaaagacgatacaaataccgctggcaccattgatatttacgtctaagtgacagccgtattgtggccctcatcgggccacttttcgccatcagccttttctttaaagacatattatctttgtatcatttctgatagttaacattacaagatataagtaatggacgcactcccaattagtctatttaaatcgccacgagtttaactgacaacccatgatcaattatgaattgcaactatttctgtagtcacttttgtggggacagtccacaaaactgccaacttccgcttcttgctcttagcggacattagcataggctatttaccataacgcctcattacgcgcaccgcccagactgactcagcgcgtttctggcatatccccggtaaaacaagtaacaaaccacccgaaaatgaacaccagaaacgcgacttaagaatctaccctatgaatggatatgcactcaaccgaatcgatcttggtttcaatcttttttatcgggatcaggcttctttttaggtaacttcgggggcttaacttgctgatgactttgcgttcggcgcgtaagccagggatggtcagctttaggtttaacatagtattttgagcgtaaatcaatacgggcattatccactcgttcatggacactcttttcatcatccagtggtagcctccataattgcaggcactagcgccgtgaacttttcacgcttatccctggtgtcgatagccttccagcgttcaaatatcttcactcgattaacgccaagcgctcgctgatcaatcgcgccaccttcatatgtgacacgctgaacatcgatgttcgggcgctctttcaaagcccagaatgcttcagtgattaatatcgtcgcctgctcctgtgtcattcctggtcgacatatccaggcatccagagcctcacgagcctgttcaggagtgattttcattgttcaaccgccccgcccgcttcgtcttacgatattcatcataaactttgggatcatactgaagctccccgccagatgcctcctgtagacgcatcgcgcgaccttcgggaactaaatcccctttccagctataaagcgaagccaaacgaatacctgctgcttgtgcaagttttgtttttgaaccgaaatacaaaagagcgtcagttttaagcatttaaaacacctttattgttagtcataactaacaagatagatgttaacaaaaacatagtcaatacgatttagcattagctaactatggaaacaaaaaatttaactatcggcgaacgcatcaggtatcgtcggaaaaacctcaaacacacccaaaggtctcttgctaaagccctgaaaatctcccatgtgtctgtatcacaatgggaacggggtgatagtgaacctacagggaagaacctttttgccctcagtaaagtattgcaatgctcaccaacatggattctatttggcgatgaagacaagcaaccaacaccacctgttgagaagccagttgccttatcccccaaagaactagagctccttgagctgtttaatgcactgccagaatcagaacaggatacccagctcgccgaaatgcgagctcgagtaaaaaacttcaataaactctttgaagaattactaaaagcccgtcagcggacaaataaaagataacatcatcaatgagttatcttttaccacatcaattatgttagctatagcatacaaaatcacttgaccgatatgttagtcatggctaatcttgtttgcatcaacacaccgcacggtgttctcagcaaacagttccgctaccccagcgttaaggggaaatgaggtcagcatggatactatcgatcttggcaacaacgaatctctggtgtacggcgtgtttccaaaccaggacggcacgttcaccgcaatgacgtataccaaaagcaaaacgtttaaaaccgaaaatggtgcccgtcgctggctggaaagaaactcaggtgagtgatatggatttcgacacaatcatggaaaaggcttacgaagaatacttcgaaggccttgccgaaggcgaagaagctctcagcttcagtgagtttaaacaggcgctttccagttcggcaaaatctaacggctgataagcgaaacagcaccgcgaggaatcagtatgcagaaacgagaacccgtcatcatcgcgccagactataccgatgatgaactttatgagtggatgcgccagaaaattaatgcagcgcaggatctgaaatgggctaatgaagccagggctaagcaggctgaaaatctgtccgctctggagcaggatatcaccaatctggaaaaagcagcggcattaagcattgccagaatgattacatacccgcgttagtagctaatcaacaaagctaaggttagtaattaaggagttctccacgggtgaggtggagtgcgtgcgccggacacgggtgcgcatccggaactgacagtttactgaaaggatatttccctgaaaagtcagaccataacgcgaaagcgcatggcgaggtagctggttcatagatagcctgtcgttaaattttcgtcgaccgtgcgcttccggttgtggcaacccgcgaaatggcgcggcggtaagtatggcggggttattccttccccgttgaggacaccgggttgtcaggttgaccatacgcttaagtgacaaccccgctgcaacgccctctgttatcaattttctggtgacgtttggcggtatcagttttactccgtgactgctctgccgccctttttaaagtgaattttgtgatgtggtgaatgcggctgagcgcacgcggaacagttaaaaccaaaaacagtgttatgggtggattctctgtatccggcgttaattgttaactggttaacgtcacctggaggcaccaggcactgcatcacaaaattcattgttgaggacgcgataatgaaaacgttattaccaaacgttaatacgtctgaaggttgttttgaaattggtgtcactatcagtaacccagtatttactgaagatgccattaacaagagaaaacaagaacgggagctattaaataaaatatgcattgtttcaatgctggctcgtttacgtctgatgccaaaaggatgtgcacaatgaattcagcatttgtgcttgttctgacagtttttcttgtttccggagagccagttgatattgcagtcagtgttcacaggacaatgcaggagtgtatgactgcagcaaccgaacagaaaattcccggtaactgttacccggtcgataaagttattcaccaggataatatcgaaatcccggcaggtctttaaaacagttccgtaataaatatccggtttcattcttatatgccagcaatggcagggatttgttcatccttaaatctgtcatgaggttaaaacaaatgagtaaagtctttatttgcgccgctattcctgacgaactggcaacaagggaagaaggcgctgtggctgtagccacagccattgaagctggcgacgaacgccgtgctcgagcaaaatttcactggcaattcctggaacattatccggctgctcaggactgcgcttataaatttattgtctgcgaggataaacctggcataccccgccctgccctcgattcatgggatgctgaatatatgcaggaaaaccgctgggatgaggagtctgcttcttttgtcccggttgagactgaatccgatccgatgaacgtcacttttgacaagctggcccctgaagtacagaacgctgtcatggttaagttcgacacatgtgaaaacatcaccgttgatatggttattagcgcacaggaattgttgcaggaagacatggcaacattcgacggacatatcgttgaagcgttgatgaaaatgccagaagttaacgccatgtatccggagcttaagttgcacgccattgggtgggttaagcataaatgtattcctggtgctaaatggcccgaaattcaggcagagatgcgcatctggaaaaaacgtcgcgaaggtgaacgcaaggaaaccggaaaatacacgtctgttgttgatctcgcccgcgccagagccaatcaacagtacactgaaaattcaacaggaaaaatcagcccggtcattgctgccattcatcgcgaatacaagcagacatggaaaacactggatgacgaactggcctatgggcgctgcttcgcagacaggcagaacttgatggtatgcctgcgatcaatgccaaacgtgtttaccggatcatgcgccagaatgcgctgttgcttgagcgaaaacctgctgtaccgccatcgaaacgggcacatacaggcagagtggccgtgaaagaaagcaatcagcgatggtgctctgacgggttcgagttctgctgtgataacggagagagactgcgtgtcacgttcgcgctggactgctgtgatcgtgaggcactgcactgggcggtcactaccggcggcttcaacagtgaaacagtacaggacgtcatgctgggagcggtggaacgccgcttcggcaacgatcttccgtcgtctccagtggagtggctgacggataatggttcatgctaccgggctaatgaaacacgccagttcgcccggatgttgggacttgaaccgaagaacacggcggtgcggagtccggagagtaacggaatagcagagagcttcgtgaaaacgataaagcgtgactacatcagtatcatgcccaaaccagacgggttaacggcagcaaagaaccttgcagaggcgttcgagcattataacgaatggcatccgcatagtgcgctgggttatcgctcgccacgggaatatctgcggcagcgggcttgtaatgggttaagtgataacagatgtctggaaatataggggcaaatccacaggtgaactacgctcctctgtttgttacgcaataaaaactggtgttttcgactatgcaaaacagtttccctcctcacgcaatctggaaaaatttggtgaggcccgacaagatttaaccataaaagaactggctgaaaaatttctggcactgaaagaaactgaagtcgccaaaacatcactcaacacataccgtgccgtcatcaaaaatatcctgagcataatcggtgaaaaaaatcttgcctcatcgattaataaagaaaaattactggaggttcgtaaagagttactgactggataccagatccccaaaagtaactatattgttacacaaccagggagatcggctgtaactgtaaataattacatgacaaatcttaacgccgtgttccagtttggtgttgataacggttacctggcagataatccgtttaaggggatctcgccattaaaggaatcaagaaccattccggatcctctttcgcgggaagaatttatccgtcttatcgatgcgtgcagaaatcagcaagcaaaaaatttatggtgtgtttctgtttatactggagttcgccctggtgagctgtgtgcacttggatgggaggacatagatctgaaaaatggaacaatgatgatcaggagaaatttagcaaaagaccgtttcacggtaccaaaaacacaggcgggaaccaatcgggtcattcatcttattaagccagcaatcgacgctctccggagtcagatgacattaacgagactgagcaaagagcatatcattgatgttcacctcagagagtatggcagaacagaaaaacaaaaatgcacctttgtttttcaacctgaagtgtcagcgagagtaaaaaattatggtgaccattttaccgttgactcaataaggcagatgtgggacgcagcgataaaacgtgccggactccgccatcgaaaatcatatcagtcgagacatacttatgcctgctggtcgctgacagctggtgctaacccggcatttatagcaaaccagatgggccatgcagatgcgcaaatggtatttcaggtatacggaaaatggatgtctgaaaacaataatgcacaggtagctttgttaaatacacagttaagcgagtttgccccaaccatgccccataacgaagcaatgaaaaattaatttaatatttatcaaatagttaacacgcatgactcttgaaatccataaattcaagcgcagtgcccagccatcccgatactgctgctttcaccaaatccttagtgcttctttcgtgtttttctattgtcataatggttatctctaaaaaagaggtaagatgcgtactacttactcgccgttattggtattattcagaaaaagtgagtaagactttgcagcaatgtttttgatcctgttcaaataaactaatggcatcagcaacatgctggaaatcaaacgtatgggtaattaatttttctggtttaattaaccctttacttaaccagtcgataacgatcgggaatttatttgcatttaagcgtgaagagaaaatagagagttcttttccggtaattccttgctgaatcacttcagacggttcactggagaaccccatcaatacaatacgtgccgctggagaagccagcgttacggcctctttcaggatagaaggatgacaagccgcatcgataattaatgtcggcttgatgcctttttcagtgaaaatctcgccaagcggtgtctggctgttattaatcgcccagtcagccccgctctctttcgctttttccagtcgttcatcaatgcgatcggcaacaatcacatttttaacgttatagacgccttttaatacctgaacgatcgtcaggccgattggaccggcaccataaaccagaacggtatcattttcagtcggttgaccatgtccggttacgttagccgcaatggtaaaaggttcgatcattaccgcatattgatcggccactgcttcaggaattttccacgcattttttgccggaaccacggcatattcactgaaaccaccgtcagcgtgcacacctaatacagccagtgtcgtacaaacgttcggtttacctatagagcacggatagcaatgcccacagctgaccaccggatcgacagcaacacgttcaccgactctggcgctttccacgccttcacccactgcatcaatgacgccaaagaattcatgaccaatgacgcgcggatatttcgcaaaaggattatgcccacgataaatatggctatctgaaccacaaattccggcaagtttcacttttactcgtacttcacccgctgacggggtgggtatttcacgttcgacaatcgccagttgattcggtttttcaattaatatgcttttcattatcttactccttaccagttccacagcgtgccatcttccagacgtgcgactggtagataagcaggttcatagggatatttcgccgccagcttttcatcgaattcgataccaagacccggtttgtctcccggatgcatatagccgttatcgaaagtccagttgtgcgggaagacttcgagcatttgttcggaataacccatgtattcctggacaccgaaattggggacccacagatcaaagtgcagcgccgcagccatgcagactggtgacaaatcggaaggaccgtgtgagccagtacgtacctgatacagcgaagcaaaatcggcaatccggcgcataccggtaattccgcctgcatgggtcagcgtggtgcggatataatcgatgagttgctcttcaatcagttgtttgcagtcccagatgctgttgaagacttcacccactgcgatgggtgtgacggtatgttggcgaatgagacggaagcattcctggttttccgcaggcgtcgggtcttccatccagaacatgcgataatcttcaatgcttttaccaaagcgcgccgcttcaataggcgttaagcgatggtgcatgtcatgcagcaaatgttcattaaaaccaaacttgttacgtaccgcgtcaaacaatttcggcatgaaatcgaggtatttctccgtcgaccacagctgctcttccggccactgtcctttggttgcgggttcataagccagacctttacctttcgacatgccgtaggtggttttcataccagggattccgcactgcacgcggatggctttgaatccaagctcttgatgacgggcataatcatccagagcttcatcaatactgtgaccggtggtatggcaataaaccatcaccccttcacgagacgcgccgccgagtaactggtaaagcggcatgttggcagctttggctttaatatcccacagcgccatatcaaccgctgaaatggccgacatcgtaaccggaccgcgacgccagtaagcacctttatagaaaaactgccagatatcttcgatacggtgcgcatcgcgaccaataagctgcggacaaaggtgatcctgcaaataagaggccacggaaagctcacgtccattgagggtggcatccccaaggcccgtaataccgtcctcagtggtgatttttaatgtgacgaaattacgccccggacaggtaacaaaaacttcagcctttacgatcttcatgttcgattccttgcatcgcttgtcgtgatgcatgaaatctacgcaactgagctactaccatacaagtataaagatcgaaaaaagccggagtgatcacaaaaaaaggcgtatatttgcgctgtgaatggttgacaaaagatgaaatagaataccttttgtcagctgacacttcctcttatcttattgataaaatggatttatgttcctacgtgcgcccccagcccgcaacaatgatcaacatgccgcaaagcgcaatcaacgcacccgtccagtcataaagagtcagtttcacgccatccacaacgcgcagccacatcaacgccgtgcagacataaacgccaccataagccgcgtaaacacgcccactcgccgctggatgcaacgttaacaaccagacaaacagcgccagtgaaatccccgccggaagcaacagccagatactggcgtttcgttttaaccacaaccagggcagaaagcatccaataatttcacacagcgcagtagcaaaaaatagtaacgttgttttaatcatctttgtctcttattgacatcatgtatagttatagggcgacataatatcatcaatataaacaccctcctggtacgttttgcgtccgcagtggatggtgtagaatcacctttaatcattcatacagggaatgaattatgaaaatcactctcagcaaacgaatcggcctgctcgctattctgctgccttgcgcactggcattgagcacaactgttcatgccgaaactaacaaactggtgattgagtctggcgacagtgcacaaagccgccagcacgccgctatggaaaaagagcaatggaatgacacgcgcaatctgcgccagaaagtgaataaacgcactgaaaaagagtgggataaagccgacgccgcttttgataaccgcgataaatgtgagcaaagcgccaacatcaatgcctactgggagcccaatactttgcgctgcctggaccgtcgaactggccgcgttattaccccctaacctgttattgatttaaggaatgtaaggacacgttatgccaagcgcccacagtgttaagctacgcccgctggagcgtgaagatttacgctatgtacatcaactcgacaataacgccagtgtgatgcgttactggtttgaggaaccctacgaagcctttgttgaactctctgatctgtatgataagcatattcacgatcagagcgaacggcgctttgtggtggaatgtgacggcgaaaaagccggtctggtggagctggtggaaattaaccatgttcatcgccgcgcagaatttcagataattatctccccggagtatcaggggaaaggtctggcaacccgtgccgccaaattagcaatggactatggctttaccgttctcaatctctataagctgtatctgatcgttgataaagagaatgaaaaagcgattcacatttaccgcaagcttggcttttcggttgaaggtgaattgatgcacgagttctttattaatggtcaatatcgtaatgccattcgcatgtgtatattccagcatcagtatctggcagagcacaaaacaccgggtcagactctcctgaagccgaccgcacaatagcattaataataatcgatcgtatttttgatggtgtaaacccgttcgacggcgggttttactccttcatcaacaatgattagctgacagtccaccggattagcgtgactgtcatattcacagctctgttttacattaccaacccgttgattattcagtaaagtaaccgctgtgtaatctaattttttgatcggatccgttgatggcgtggcgctgacagataatgttttgtcgttacttttcgtggttttacccagcggataaccctgatcatcatagcgatattccatctgcatttgtttgctgctggctttaatcacgaagccattatcatcggtttcccaactcaccccggcagaaggtaattctgctagctggcattttccctgtaaacgtactctcttctccagcgtctcggcatcacggtaataattggcgtccagtaccagagcgaccacggtattattttccagatccagtaattcgagtgaatcaaaacagccttcttccgacaaagtcccagaaacacgtttcgtcacttcaccttgctcatccattaatgtctgagtgaaatcttttaccggaccacgcagcggatcaaaatcgaattcattagagaaactggccatctcaggggtaaatgaaagtgttacctctgtgcggtcacatcctgtgaggaatatcgcgagtaagcatggtagtaatttgtatttcacaacagtcaccagagagtagagatgattctcaatcatagtagcaaatacagtactttacacgttaaatgctatgcttaaagaagttatcttcgcgtaaggagcttatgatgaaactctcaacctgctgtgccgcgcttctgctcgccctcgcctcacccgcggtactcgccgcgccgggatcctgtgagcgcatacagagcgatatatcacagcgcattatcaataatggcgtacccgaaagcagcttcacgttaagtattgtacccaatgaccaggttgatcagcctgattcccaggtcgtcggccattgcgctaatgatacgcataaaattctctatacccgcaccaccagcggtaacgtctctgctcccgcgcagtctagccaggatggcgcgcctgccgaaccgcagtaacacattatcgactgaacgccggatatgacaaatccggcgatttgaacatacaacataatcccaccttattactcatacccttctattgatatggattaataattcttaacccaaaatgggtagactccctctattgttagcgcgctaaatattcaatatataaacttttatataacgataaagaacagggagtgagttatgtccaaaaatgaacgaatggtgggcatcagccgcagaacactcgttaaatctaccgcgataggttctctggcgctggctgcaggcggtttttctttgccgtttaccctgcgcaatgcagcagcagcggtacaacaggcccgcgaaaaagtggtctggggtgcctgttccgtcaactgtggtagccgctgtgcacttcgtctacatgttaaagataatgaagtgacctgggtggaaactgacaataccggcagcgatgagtacggcaaccatcaggtacgcgcctgtttgcgcggtcgctccatccgccggcgtattaatcatcccgatcgcttgaattacccaatgaaacgcgtgggcaaacgcggcgaaggcaaattcgaacggattagctgggatgaagccctggatactatcgccagtagcctgaagaaaaccgtcgaacaatatggcaatgaggctgtatatattcagtactcttcggggatcgttggcggcaatatgacccgctcttcgccatcagcctcggcggtcaaacgcctgatgaactgctacggcggttcactcaaccagtatggctcctacagcactgcgcaaatttcctgtgccatgccctacacctacggcagtaatgatggcaacagcaccacggatattgaaaacagcaagctggtcgtgatgtttggtaacaacccggcagaaacccgcatgagcggtggtggcatcacttatcttcttgaaaaagcgcgcgagaaatcgaacgccaaaatgattgttatcgatccgcgatataccgatacggctgccggtcgtgaagacgaatggctccctattcgcccgggcaccgatgccgcgctggttgcgggtattgcctgggtattgattaacgaaaatctcgttgatcaaccttttctcgataaatactgcgtcggctatgacgaaaaaaccttacccgcagatgcacccaaaaatggtcactataaagcctatattcttggtgaaggtgacgataaaacagcgaaaacgccgcagtgggcttcgcaaattaccggtatcccggaggaccgtatcatcaaactggcgcgtgaaattggcacagcaaaacccgcttatatctgccagggctgggggccacaacgccaggcaaacggcgaactgactgcacgcgctattgctatgttacctattttgacgggcaatgtcggcatcagcggcggaaatagtggcgcgcgtgaatcgacctataccattaccatagaacgcctgccggtgctggataatccggtcaaaacgtcaatctcctgcttcagctggacagatgctatcgatcatggtccgcaaatgacggcaatccgcgacggcgtccgcggcaaagataaactggatgtgcccattaagttcatctggaactacgcgggaaataccctcgttaatcagcattctgacatcaacaaaacgcatgaaattctgcaggacgaatcgaaatgcgaaatgattgtggtcatcgaaaactttatgacctcatcggcaaaatatgccgacattctgctgccagacctgatgaccgttgagcaggaagatattattcctaacgactacgccggtaacatgggatatctcattttcctccagcctgtcaccagcgaaaaattcgaacgcaaaccgatttactggatcctgagtgaagtcgcgaaacgtcttggacctgacgtctatcaaaagttcacagaaggtcgcacgcaggaacaatggttacaacatctgtacgccaaaatgcttgccaaagatccggcgttaccgtcttacgacgaactgaaaaaaatgggtatctataagcgtaaagatcccaatggccattttgtcgcctacaaagcatttcgtgacgaccccgaggcaaatccacttaaaacgccttccggtaagattgaaatttattccagcaggctggcggaaattgcccgtacctgggaactggaaaaagatgaagtgataagcccattgccagtttatgcctcaacctttgaaggctggaactcccctgaacgtagaaccttcccactgcaactgtttggtttccattacaaatcccgtactcactcgacctacggcaatattgatctcctgaaggctgcctgccgtcaggaggtgtggatcaaccctatagatgcgcagaaacgtgggattgccaacggcgatatggtgcgggtgtttaaccatcgtggcgaagttcggctaccagccaaagtaacaccacgtattctccctggagttagcgctatgggccagggagcctggcacgaggccaatatgtctggcgataaaatcgaccatggcggctgtgtgaatacgctaaccactctgcgcccttcaccactggcgaagggaaacccgcagcacactaatctggtcgagatcgaaaaaatataacccacgacaaccataaattctggcatgacattttgtttgaaaagcaataagtgagtaatgatgaaaatccataccacagaggcgctcatgaaggctgaaatcagccgtagaagtctgatgaaaacctccgcacttggcagtcttgcgctggcaagcagtgctttcactctgccattttcccaaatggtccgggcggcagaggctccggtagaagagaaagcggtctggagttcctgcaccgttaactgcgggagccgctgtctgttacgtttgcatgtgaaagatgacaccgtgtactgggtggagtctgatacgacaggtgacgacgtctacggtaatcatcaggttcgagcgtgtttacgcgggcgctctatccgccgacggatgaatcatcctgataggttgaaatatcccatgaagcgcgtcggcaagcgcggtgaaggtaaatttgaacggataagttgggacgaagccctggataccatcagtgataatcttcggcggatcctgaaagattacggcaatgaggctgtacatgtcctgtacggaacaggcgtagatggcggaaacatcaccaactcaaacgtcccgtaccgtctgatgaactcttgcggtggttttctcagtcgctatggcagctacagtaccgcacagatcagtgccgcaatgagttatatgttcggtgccaatgatggcaacagcccggatgatatcgccaatacgaaactggtcgttatgttcggaaataacccggcagaaacgcggatgagcggcggtggtgtcacttactacgtcgagcaagcccgcgaacgttcaaacgcacgcatgatcgtcatcgatccacgttataacgacactgctgccgggcgtgaagatgaatggctgcccattcgccctggcaccgatggcgcactggcctgtgcgattgcctgggtactgattactgaaaacatggtcgatcagccatttctcgacaaatattgtgttggttacgatgaaaaaacgctgcccgccaacgcaccacgtaacgcgcattataaagcctatattctgggcgaagggcctgacggcatagctaaaacgccggaatgggcagcaaaaatcaccagcatcccggcagaaaaaattatccagttggcacgagagatcggttcagcaaaacctgcttatatttgtcagggttgggggccacaacgacattccaacggcgagcaaacatcccgcgctattgccatgctttccgttctcaccggcaacgtcggcataaacggcggcaactcaggcgtacgcgaaggtagctgggatctgggggtagaatggttcccgatgctcgagaatcctgttaaaacgcagatttccgtctttacatggacagatgccatcgaccatggtacggaaatgaccgcgacccgtgatggtgttcgtggaaaagaaaaactggatgtccccatcaagtttttatggtgctacgccagtaacacattgatcaatcaacatggcgacatcaatcacacccatgaggtgcttcaggatgacagcaagtgcgagatgattgttggcattgaccacttcatgacggcctcggctaagtattgcgatatcctgttgcccgacctgatgccaacagagcaagaagaccttatctctcatgaatctgcagggaatatgggctatgtgatcctcgcccaacccgcaacctcagcaaaatttgaacgcaaacccatctactggatgctgagtgaagtcgccaaacgcttaggaccagacgtttatcaaacctttactgaaggtcgcagtcagcatgaatggatcaaatatctccatgcgaaaacgaaggaacgtaaccctgagatgcccgactacgaggagatgaaaacgaccgggatctttaagaaaaaatgcccggaagaacactacgtcgctttccgcgcattccgtgaagatccacaggcaaacccgttgaaaacaccttcggggaaaatcgaaatttattctgaacgactggcgaagattgcagatacctgggaattgaaaaaagatgaaattattcatccccttcctgcgtataccccaggttttgatggctgggacgatcccctgcggaaaacctatccactgcagttaacgggcttccattacaaagcgcgtacccactccagctacggcaatattgatgtgttacagcaggcctgcccacaagaggtgtggatcaaccccattgatgctcaggcacgcggtatccgtcatggcgataccgtgcgggtatttaacaataatggagaaatgctgattgccgcaaaagtgactccgcgtattctgcctggcgttaccgccatcgggcaaggtgcgtggcttaaagcggatatgtttggtgaccgggtcgatcacggcggcagtatcaatattctgacctctcaccgcccttcaccgctggcaaagggaaacccgtcgcacagcaatcttgtccagatcgaaaaggtttaaggagtagcccatgaccacacaatatggattttttatcgattccagccgctgtactggctgtaaaacctgcgaactggcgtgcaaagattttaaagatcttggcccggaagtcagtttccgccgtatttatgaatacgctggcggcgactggcaggaagataatggcgtctggcaccagaacgtgttcgcttattatctctccatctcctgtaaccattgcgatgaccccgcatgtacaaaagtctgccccagcggcgcaatgcataagcgtgaagatggctttgtggtggttgatgaagatgtttgtatcggctgccgctactgccacatggcttgtccgtacggcgcgccacagtacaatgctgaaaaagggcacatgacgaagtgcgatggttgttattcgcgcgtcgccgaggggaaacaacccatatgtgtcgaatcctgcccgctgcgtgcacttgagttcggtccaattgaagagctgcgccagaagcacggcactcttgctgccgtcgcgccactgccgcgcgcgcatttcacaaaacccaatatcgttatcaaacctaacgccaacagccgcccgaccggcgataccactggttatctggctaatccggaggaagtgtaaaatgggaaatggatggcatgagtggccactggttatctttaccgtattgggtcaatgcgtagtaggcgcgctgattgttagcggaattggctggttcgccgccaaaaatgacgcagaccgtcagcgtattgtccgtggcatgtttttcctctggctgttgatgggcgtcgggtttattgcctctgtcatgcacctgggatcgccactgcgggcgtttaactccctgaatcgaatcggagcttctggtctgagtaacgagattgctgccggttccatattttttgccgttggcggattatggtggctggtggcagtcatcggtaaaatgccgcaagcgttggggaaactctggttacttttcagcatggcgctcggcgtcattttcgtctggatgatgacctgcgtgtatcaaatcgacaccgtgccaacctggcataacggttacactacgctggctttcttcctgacggtattgttgagcggtccaatacttgctgccgcaattctgcgggcagctcgcgttacatttaataccacaccatttgccatcattagcgttctggcgctgatcgcttgtgccggggtgattgtgctgcaaggtttgtctctggcgtctattcactcatccgtgcaacaagccagcgcactggtaccagattacgcctccttacaggtctggcgtgtggtattgttatgcgcaggtcttggatgctggctttgcccgctcattcgtcgccgtgaacctcacgttgccggacttattctggggctaatcctcatacttggcggtgagatgatcgggcgtgtgctcttttatggcctgcacatgacagtaggaatggctattgcaggttaacaaattggtgcggggcaacccgcacatttcaggatgttaggaatgacccatttttcacagcaagataatttttctgtcgcggcgcgcgtgttgggcgcgctgttttattacgctccagagagtgcggaagccgcacctctggttgcggtactcaccagtgacggctgggaaactcagtggcctctaccagaagcgtcattagcgccgctggtgacggcttttcagacacagtgtgaagagactcacgcccaggcctggcagcgtttgtttgtcggcccgtgggcactgccgtctccgccgtgggggtcggtctggctggatcgcgaatctgtgctgtttggcgattcaacattggcacttcgtcagtggatgcgcgagaaaggcattcagtttgaaatgaagcaaaacgaaccggaagatcattttggttcactgctgttgatggctgcgtggttggcggagaatggtcgccagacagaatgcgaagaattgctggcatggcacctttttccgtggtcaacacgttttcttgatgtttttatcgaaaaagcagaacaccctttctaccgtgcactgggtgaactggctcgcttaacgctggcgcaatggcaatcacaactgttaattcctgtcgcggttaaaccgctgtttcgataggatcaccgtaatattgccggatggtgacgattacgcgcaatccggcaataataggttacagtgtcacgtttttttatctcttaaagcacgcactgcttttgcggctggcctcttttgccgcaaaatagtcgcccgtgtttcattgcccatttctgctcatgcatcatctacacatctatccggatctgcgcactatgttccaccgtctgcttatcgcaacagtcgtcggtattctcgcggcctttgccgttgccgggtttcgtcatgcgatgctgctactggagtggttgttcctcaataatgactccggcagtctggtcaatgcagcgacaaacctttccccctggcgacggttgctaactccggcgctcggcggactggcggcgggtttgttgctgatgggctggcagaaatttacccaacaacgccctcatgcgccgaccgattatatggaagcgttgcaaaccgatggacagttcgattacgcagcaagcctggttaaatcgcttgcctctctgctggtagtaaccagcggcagtgcaattggtcgcgaaggtgcgatgattcttttagctgcccttgccgcctcctgttttgcccaacgttttacgccacgccaggagtggaaattatggatcgcctgtggggccgcggcgggaatggctgcggcctatcgtgccccgcttgctggcagtttatttatagccgaagtgctgtttggcactatgatgttggcctctctcggcccggtgattatttccgccgtcgtggcattgctggttagcaatctgattaatcatagcgacgcgttactctacaacgtacaactctcagtgacggttcaggctcgtgactatgcgctgattatcagtacaggtgtgctggcaggtctgtgcggaccactgttgttaacgttaatgaacgcctgtcatcgtggatttgtgagtctcaaacttgcgccgccctggcaactggcactaggcgggttgatcgtgggtctgctttccctgttcacacctgcagtgtggggcaacggctatagcaccgtacaatcctttttaaccgccccaccactgttaatgatcattgccgggatcttcctttgtaaactgtgtgccgtgctggcgagtagcggttccggcgcacccggtggggtctttacaccgacgctatttatcggtcttgccattggcatgttgtatggtcgtagcctgggattatggttccctgatggcgaagaaattacacttttactcggattgaccgggatggcgacactgttggcggcgaccacgcacgcgccgattatgtcgacgttgatgatatgtgaaatgaccggggagtatcagctactccccggtttattgattgcctgcgtaattgcgtcggtaatttcgcggacgttacaccgtgactctatctaccgccagcacactgcgcagcatagctaagcggatgtattgccccagttcacgctgttcggcgcgcggcagataaggcagttcaccaatgagcggtgccggaagttttttacccagcacatcaatgatttccgcataatgcgccagtcctgggttgattcggttagccacccagccaatgagcggcagcccgtcgttggcgatcgcctgagctgttagcagtgcatggttaatgcaaccttcctgaataccgacaaccatcaacaccggcagttgttcctgcactacccattcagagagtggacgcaaatcattcatcagactgcgccagccgccagtcccttctaccacgacatgatcgactttttcggtcaggtttgccaggccgtttgaaatgagggtgtaattgattgggcaactgtgcgccacgctactttcttcttcgcttaacgcgataggattaactgcttcataaggcagttcgatggttgaaacactctgcaacaccagggcatctttattacgcagcccttcgggtgtctctttgctccccttcgctacgggtttatatcccgcaaccgtttttccctgggaggctaacgcttgtagcaatgcgcgggaaaccaccgttttccctacagaagtgtctgtaccggtaataaagaaacgcttcagcatcactaactccaccgttatgcttcacaaatataaaccaggaaaataattaaccttgaaagtctaagttatgctttcctggcccaaattgagatagcgcaaattttggtagaacagttaaaaaatgttaaccctgcaacagacgaatcaacaaagaaccgttatacatcgcgtcttttaccagtgcagcgcctgccatcgtgccctggttagaaaactgagtactctcaacgctgatgtgctgactatacgcaggaagggcctgctgacggatgctgtctgagatgaccgggaagaggatatctgccgctttacttaacggtgagccaatcagtattttttgtgggttaaataaattcaccatgatggcaagaatgcgcccgacatgcgcgcccaccccggtaatgatgtcttttgccagtagatcgccgcgcaatgccgcctgacacaatgagtccacggttaacggttgtccatgtaacatcgagctcatggattgattaagacgcagctgtgccagctcaagaatactgtccacgctggcgatggtttcgaggcagccgtgattcccgcaataacagcgtttcccatacgggtcgacctgtgtgtggcctatttccacgagactactgctgcctgcgtgtagcagatgaccatcggtaatgacgcccgcccccacgttgtgatcgataaccacctgaatcacatcgcgcgccccgcgtgaggcaccaaacaaggcctctgccatcgtccatgcgctgatatcatgctgaatataaaccggaacgccggtatgctgctccagcgcctcgccgagcggcatctcttttacatcctcgtagaacggcatgcgatgtacaataccattttccgtatcaataattcccggcaaggttatggcaatcgaagttagacgctcaagttttttctggtggcggataaaaaactgatcgatatgggaaataatacgatccagcaatggcaagtcatcttttaacgccagttcctgcgactcttccaccaccagtttgctgctcagatcgcgcagagcaaggaaaatctccccgcgactaatgcgcagagaaagatagtgccaggcttcagtttcaaccaccagccccaccgccggacggccacggttccccgcttctttgatttccagctcttgcaccaggtgtgcttcgagcatctcacggacaattttagtgatactggcaggagccagttgcgccagacgggaaagatcgatacgcgagactggaccaagctgatcaatcaggcgataaaccgcgcccgcgttggtctgctttatttgatcaatgtgcccaggctggttttcagcaaccaccgcatactccctatattttcgcgctccgaaataatctgtaggctatggtgaagcacttcaatacgtgtcgtcaaatttttacttaggcatgtgattaacagcacatttttcgggctttttcgctgaaatttccctcacctgagagcattcagcagatgaatacgaaagttacgcgcagccggactttgttcatgatgtttcggccagaccaaccacatttcagaaaccgcatcctcttcagcaatcggcacccagcgcatttcgttgagctgaacacgtttaaatgacgcaggcaaaattgaaacacccagaccggcggaaaccagaccgatgatggtcattgcctcgcccacctcctgagtgatgacgggcgtcaaatggtaacgtcgcatcagcccgagaatatcgtcatacagccctgtcccgacgtgcggatcaaaaaagacaaagggttctttcgccagttcagccagcgttacattcgggttatttgccaggggatgatcgtgcgggatcatcgccataagcggttcatggacgatgactgcgtgttcaagcgactccggtaacgctgtgttacgcagcaatcccatatccagcgttccttcaatgagcggagcgatttgctcgcgagtgttcatttcgcgggtttgtaaatggacatcaggataatcacggcgaaacagcgataacgtatcggacaccgcccgaataaaaggagccgacgaagtaaaaccaatgcgcaactcccccgcttcaccctgatgcagcctttcagcgcgagcggcagcgtcatccaccatagacaggatttgccgactatctgcaagaaactgttttcctgctgccgtcagcaatacactgcgattggttcgtgccagcagtcgggcaccaatttgttgctccagcgcctgaatctgctgacttagcggcggttgcgaaatattcaggcgggcagcggcgcgcccgaaatgcagctcttccgcaacagcaacaaagtaacgcagatgacgaagttcaatattcatatttaaaacatcttatttgagattattaatatattagacagaacaattcgattttcctaccctatgtataagcctgatctacaggcatatttagcaaggatttcaagtgagccgtactacaactgttgatggcgctccggcaagcgacactgacaagcaaagcatttctcagccaaatcaatttattaaacgcggtacgccgcaatttatgcgcgtcaccctggcgctgttctctgccggactggcaacatttgcacttctctattgtgtgcagcctatccttccggtgctttcgcaggagtttggcttaacccccgcgaacagtagtatttcactgtccatttccacggcgatgttggctattggtttgctgtttactggcccgctatccgatgccattggtcgcaaaccagtgatggtcacggcgctactgttggcctccatttgtacgttactttcgacaatgatgaccagctggcacggcattttgattatgcgcgccttgattgggctttcgttaagtggcgtggcagctgttggcatgacttatcttagcgaggaaatccatcccagtttcgtggccttttcaatggggttgtatatcagcggcaactcaattggcggcatgagcggacgcttaattagcggtgtcttcacggactttttcaactggcgaattgctctggcggcaatcggttgtttcgcgctggcctcggcgttgatgttctggaaaatcctccctgaatcacgccattttcgcccgacttcgctgcgccctaagacgttgtttatcaactttcgtctgcactggcgtgaccggggattaccgttattgttcgcagaaggctttttgctgatggggtcgttcgtcacgctgtttaattacatcggctatcggttgatgctctccccctggcatgtcagtcaggccgtggttggcttattatcgctggcttatttgaccggtacatggagctcacccaaagccggaaccatgaccacccgctatgggcgtggtccagtgatgttgttttcgacgggggttatgctgtttggtttactgatgaccttattcagctcgctgtggctgatctttgccggaatgttactcttctcagcaggattcttcgcagcccactcagtagccagcagctggatcggcccccgcgcaaaacgcgctaaaggccaggcctcctcgctgtatctgttcagttactatctggggtcgagtattgccgggacgctgggtggtgttttctggcataactatggctggaacggcgtcggcgcatttattgctctgatgctggtcattgctctgctggtcgggacgcgtttgcatcgtcgtctgcacgcctgaaaaataagtccggactgcggtaaatacccgtccggacttattgccagctcaaaccaacgttaatagccatcctaaaatagacgaagcgccagccaattcccgcagcgcgtctagcgtcatcaggattataagtacccaaataaacggattcattttgctgtgtgtcatttattactgatgcgcagttattctactgctttgtaagtagtaaaatagttaacccgatcaagactactattattggtagctaaatttcccttaagtcacaatacgttattatcaacgctgtaatttattcagcgtttgtacatatcgttacacgctgaaaccaaccactcacggaagtctgccattcccagggatatagttatttcaacggccccgcagtggggttaaatgaaaaaacaaattgagggtatgacaatgaaaaaagtattagctctggttgttgccgctgctatgggtctgtcttctgccgcctttgctgcagagactacgaccacacctgctccgactgcgacgaccaccaaagcagcgccggcgaaaactacacatcataaaaaacagcataaagcagcacctgcccagaaagcgcaggcggctaaaaagcatcataaaaatacgaaagctgaacagaaagcccctgaacaaaaagcgcaggcagcgaagaaacacgccaagaaacacagccatcagcaaccggcaaaacctgctgcacaacccgcagcgtaagttttcaacagtaatgctggcgcgccccctcgcgcctgaaaattacggtgctaagcgggtaacgtttagcaccgcctttagcggagggtagtatggtgggccgttatcgctttgagttcattctgatcatccttattttatgcgcactgattaccgcccgtttttatctttcctgattgtagttatctgattttactcccactttcatcccgtcccgtctatagtatttatgagggtttgcttttaataatcataattacccaccagagtgtgatatgcgtacaaccattgctgtagtgttgggtgcaattagtttgacgtctgcttttgtgtttgcagataaaccagacgttgccagatcggcaaacgatgaggtcagcaccctgttttttggtcatgatgatcgtgtgccagtgaatgacacgacccaatcaccgtgggatgcggttgggcaactggaaacggccagcggcaatttatgtacggcgacgctgattgcacccaatctggcattaacggcaggacactgtttattgacacctccaaagggtaaagccgataaagcagtggcgctgcgttttgtgtcaaataaaggtctttggcgctatgagatccacgacatagaaggccgcgttgatccgacactgggaaagcggttaaaagcagatggggatggttggattgtacctcccgcagccgcgccgtgggacttcggattgattgtgctacgtaatcccccttctggcattacgccgttgccgttatttgagggagataaagccgcgcttaccgccgcattaaaagcggcaggtcgtaaagtgactcaggcaggctaccctgaagatcatctcgatacgttgtacagtcatcaaaactgtgaagtgactggctgggcgcaaacgtcggtgatgtcacatcagtgcgataccttgccgggtgacagcggttcgcctctgatgttgcataccgatgacggctggcaattaattggggtgcaaagttcggctcctgccgcgaaagatcgctggcgcgccgataaccgggccatttctgttaccggttttcgcgacaagctggatcaactgtcgcaaaaataatgttcaaacgctgcccgacagcgcgggcagcgtcttcatcaggcaagtttcaccatgatcattccagccaacagcaagaccaggccaatccagcctttacgatttaaccgttgaccaaacaagatccaacctgcggctaacgtggcggcaataccaaacccgccccacaatgcataagcgacagacaagtcgatccctttaacggcttgagaaagcgcactaaaggcagccagcaccgccgccagggagagcaagccaaatattttgcgacgaaagccgtcagaaaatttcaaaaagacgttagcaacgatttccagcacgattgccaatgccagccaggcggcgtgaacccattcaaactgcgccatggttcacctccagttcaggtttacgcgctttacgggtacctgattttatcaacacaatcccggcgaccagggtggttaacccggcaattttcatcagcgataaactttcgtcgaataacaaaacgctaaacaaggtaataaataaaataccgataccttcccacagcgcataagctacgcctaaggcgatttttttaacggcgaaagagagaaatatatacgacagagaaatcatcaccagcattaaaataaagccgccatttccctcactgacgctcgcccatttcattgacagcgtaccggtaatttctgtagcaatagccagacctaataaaatccaataaatatacattgtccttctcctgcaagagaattattttaattttcgcttaattcagcgaaaccaaagtaaagtggtcaagccccgcgcatagcgcaagctttggcagaagaaaggactaaagcgcgttgcgccagtgctgctcacctacgagcaagatagtggatgaggtacgaagatgggtaaatgtagaaaataacgtcctgaacaaattgtccataatattacaattatccgcagtgttgcttctcgtcatcgcggatgataattgtcctcggtagttgaacacgcctgatttgtatcatagcttaagaattaactcaaaatattttcacttctttacctgagcggtttgattttcgttatgatgacggagcgaaaaagacattattattagcaaaggaagaaaaaacggggacaagcatggcaaagccgatcatcacgctcaatggcctaaaaatcgtcattatgttgggaatgctggtcattattctctgcggtatccgttttgccgccgagatcatcgtgccgtttattctcgcattatttattgctgttattcttaacccgctggtgcaacacatggtccgctggcgtgtgccgcgtgtactggcggtgtcgattttgatgaccatcatcgtgatggcgatggtgttgctattagcttatctgggttccgcgctcaacgagttgacgcggacgttaccgcaatatcgcaactctattatgacgccgctgcaagcgcttgaaccgttgttgcaacgcgtagggattgacgtctcagttgaccagctggcgcattatattgatccgaacgcggcgatgacgttgctcaccaacttattgacgcagttatctaatgccatgtcatcaatatttttattgctgctgacggtgctgtttatgctgctcgaagtgccacaattgcccggaaaatttcagcaaatgatggcgcgtccggttgaagggatggcggcgattcaacgtgcgattgacagtgtttctcattatctggtgctgaaaacagccatcagcatcatcaccggcctggtcgcctgggcgatgctcgccgcactcgatgttcgcttcgcttttgtctggggattgctggcctttgcgcttaattacatcccgaatattggttcagtcctcgcggcaatcccccctatcgctcaggtactggtgtttaatggcttctacgaagcgttgctggtgctggcgggatatctgctgattaatctggtcttcggcaatattctggagccgcgtatcatggggcgtgggctggggctttccacattggtggtatttttgtcgttgattttttggggatggttgttaggaccggtgggtatgctgctttccgtgccgttgacaattattgtcaaaattgcgcttgaacaaacagcgggaggtcaaagcatcgccgttctgttaagcgatctcaataaagagtgacggcctcagcagaggccgtcagggttacagagctttcaggattgcatccacgctggctttggcgtcaccaaacagcatgtgggtgttttccttgaagaacagcgggttttgcacaccagcatagccagtgttcatcgaacgtttaaagacaatcacgttctgcgctttccacacttccagcacaggcataccagcaatcggactcttcggatcatcctgcgccgccgggttaaccgtatcgttagcaccaatcaccagtacggtatcggtatcagcaaagtcatcattgatctcgtccatttccagcacgatgtcatacggtacttttgcttcagccagcaatacgttcatatgtccaggcaaacgccccgcgaccgggtggataccgaaacgcacattaataccacgagcgcgcaatttctcagtaatttcagcgacaggatattgcgcctgcgcgactgccatgccgtaccccggagtaatgatcactgaatgggagtttttcagcagttccgctgtctcttctgcggtgatttcgcggtgctcacccacttcctgatcatcgccagtagaagagccgtcggtgccgaaaccacccgcaataacgctgataaaggaacggttcatcgccttacacataatgtaagaaaggatagcccccgaagaaccgaccagcgcaccggtcacaatcagcaggtcgttgctgagcataaagcccgcagccgcagccgcccagccggagtacgagttcagcatcgacaccaccactggcatatctgcaccaccgatggaggcgactaaatgccagccgaataccagcgcaattgcggtcattatcagcaatgccagcacttgcaggccgacgctgtccgtgcgaacaaatacaatcagcagcaggaaggaaacgaccagagccgccaggttcattttgtgacggtttggcagcatcaatggtttagacgaaatcttgccacacagtttgccgaacgccaccaccgaacccgtgaacgttaccgccccgatgaagataccgaggaacacttccgtcaggtgaatattgaccagaatcggtgccattcccgcgtcatgatgcagatagctgttaaagccaaccagcactgccgccagacccacgaagctatgcaggatcgccaccagttctggcatttcggtcatttcaactttcttcgccagacggataccaattgccccaccaatgaccatcgccagcaagatccagccaacattacccgtatccggtccaaaaatggttgcgattaacgcaatcgccatcccggcgataccgaagttgttaccctggcgagacgtttcatgtttcgaaagaccggccagactgaagataaacaggatcgcggcaacaatgtatgcagctgtaactaatcctccagacatatgttaccccttaatttttgcggaacattttcagcatgcgctgagtcacggtgaagccaccgaaaatattaatgctggctataagcaccgcgataaaactaaggaagctaacccagccgccctggccaatctgcaacagtgctccgacaacaataatccctgaaatcgcgttggtgaccgacatcaacggtgtatgcagcgcgtgcgatacattccacaccacgtaataaccgacaacgcaggccagcgcgaaaacggtgaagtgcccaaggaattctttcggcgcaacgcttgccatccagccaaaaagaatgattgccagcgccatcaacgcgtatttacgccacggtgagcaggtacatttttcctcagttttcacttccggtgccgctttttgtgccgcctgcggctgagctgatacctgaatcggcggtgccggccaggtaatttcgcccgcacggatcacggtcacgccgcgaatcaccacatcatcaaaatcaacagtgatattgccgtctttctctttgcacaacagtttcagcagattaacgaggtttgtgccgtaaagctgtgaggattgcgtcggcagacggcccggaagatcggtataaccaatcactttgacaccattttccgtagtgaagatttcacccggcacggtgtattcacagttgccgccgttttgggctgccaggtcgacaatcacactgcccgccttcatggagtcaaccatttcacgggtaattagcttcggcgctggtttgcctggaataagcgcggtggtgacaatgatatcgacctcttttgcctgggcggcaaagagttccatttccgctttgatgaacgcgtccgacatcactttggcatagccatcgccgctgccagcttcctctttaaaatccagctcgaggaattccgcgcccatactttgaacttgttctttcacttccgggcgggtgtcgaatgcacgcacaatcgcgccgagactgtttgctgcgccaatggcggccagacctgcaacacccgcaccaatcaccatcacttttgccggtggcactttcccggccgcagtaatttgcccggtaaagaagcgcccaaattcatgtgccgcttcaacaatggcgcgataaccggcgatgttcgccatcgagcttagtgcgtccagcgattgtgcgcgtgagatacgcggcacagagtccatcgccatcacggtcacgttacgttccgcaagtttttgcattaattccggattctgcgcaggccagataaaactcaccagcgttgtcccaggattcagtaacgcaatttcatcatctaacggcgcattgaccttcagaatgatctctgactgccagacgctattcccttctacaatttcagcgcccgcttgcacaaacgctttatcgtcaaaacttgccagttgacccgcgccgctctctaccgcgacggtaaaacccagtttcagcagctgttccactgtttttggcgttgctgcaacacgggtttcattggttaaccgttctcttggtatgccaattcgcatgatattcccttccatcggttttattgatgatggtttgcctgtgtcaggagccacacaagctgctcatgtacgagctaaatgttactccgttaaaataaattagtaacaaacgccctataacgtactgaaaattatgcctgtgatctagcgccaaaaatcagtatttcggcgtgaactcgcaaaatattaacgattcagccgtgatagtgggataaacaccttagaacgccggataaagactgataattgtcttcgacggtcgggtaaaacgagacatcgccccggcacgaatcactacttaacattaaattaacttatacaattcagttgcttcagtagtaatgatgctgatacggctgttttttaagcatagacggtcatttgagcaggattaaaattggcttaaggaatgtgatatgaaaaatgacgcagacagttacaccgtttaaatgcaataatcagccacgtttctcgttaataacaataccagtacctggtttgcgcaaggcgaaggattatttttatgaagcttaagaacaccctcctggcgtcggcactgctttctgctatggcattctccgttaacgcagcaacagaactgacaccggagcaagcggcagcggttaaaccttttgaccgtgtagtggttaccggtcgttttaatgctattggcgaagcggtgaaagccgtttctcgtcgcgcagataaagaaggtgccgcctctttttatgttgtcgacacttctgattttggtaacagcggtaactggcgtgtggtcgctgacctctataaagccgatgctgaaaaagcagaagaaacaagtaatcgcgtaattaacggtgttgtcgaactgccgaaagatcaggctgttctgattgaaccgtttgacacggtcaccgtccagggcttctatcgtagccagccagaagtcaatgatgccatcaccaaagcggcaaaagcgaaaggtgcctactctttctacatcgttcgtcaaatcgatgccaaccagggcggcaaccagcgtattactgcattcatctataaaaaagatgctaagaaacgtatcgtccagagcccggatgtgatcccggcagattccgaagcaggacgtgcagctctggctgccggtggcgaagccgcgaagaaagttgagatcccgggtgttgcgactaccgcatcaccaagttctgaagtcggtcgcttctttgaaacccagtcatcaaaaggcgggcgttacaccgtcacgctcccggatggcactaaagtcgaagaactgaacaaagcgaccgcagcgatgatggtcccgttcgacagcatcaaattctctggcaactacggcaacatgaccgaagtctcctatcaggttgcgaaacgtgccgcgaagaaaggtgctaagtattaccacatcacccgccagtggcaggaacgtggtaataacctgaccgtcagcgcagatctgtataaataactattcagttactcctataaggcggcttgatgccgcctttcgcatttttagtcacaaatttccccgcgaccattgcatgcagacacatctcttcgtaaaatcccgcgcttcagtggcaaactccatttttatgcgttttgccctaatatttattcttcttatcacgttttaatcactggatatcgatggaaaagaaactgggactgagcgcactcaccgcgctggtattaagctcaatgctgggcgcgggtgttttcagtctgccgcaaaatatggcggcagttgccagcccggcagcactgctcatcggctggggtattactggcgctggcattttattgctggcctttgccatgctgatcctcacgcgcattcgtcccgaacttgacggcggtatctttacctatgcccgcgaagggtttggcgagctaatcggcttttgttccgcatggggatactggctgtgcgcagtcatcgccaacgtctcctatctggtgatcgttttttccgcgttaagcttttttacggacacgccggaattgcgcctgtttggcgatggtaatacctggcaatcgatagtcggtgcatcggctttattgtggattgttcactttttgatcctgcgcggggtgcaaaccgctgccagcattaacctggtggcgacactggcaaaattgttgccgctgggtctgtttgttgtgctggcgatgatgatgttcaaactggataccttcaagctcgacttcaccggacttgcacttggcgtacccgtttgggaacaggtgaaaaacaccatgctgatcaccctgtgggttttcattggtgtggaaggtgccgtggttgtttctgcgcgtgcgcgtaataaacgtgatgttggcaaagcgacactgctggcggttctctccgctctgggcgtttacttgctggtaacgctgctttcgctgggtgtggtggcacgtcctgaactggctgaaattcgtaacccgtcaatggccggtctgatggtggaaatgatgggaccatggggcgaaatcatcatcgctgccggtttgatcgtttccgtttgcggcgcgtacttaagctggaccatcatggcagcagaagtaccgttcctggccgccactcataaagcattcccgcgcatttttgcgcgccagaacgcacaagctgcgccatccgcctcactgtggttgaccaacatctgcgtgcaaatttgtctggtactcatctggctgaccggttccgattacaacacgttgctgaccatcgcctcagaaatgattctggtgccctatttcctggtcggcgcgttcttgctgaaaatcgcaacccgtccactgcataaagcggtaggtgtcggtgcctgcatttatggcttatggttattgtacgcctctggtccaatgcacttgctgttatccgttgttctgtatgcaccggggctgctggttttcctgtacgcgcgcaaaacgcatacccatgataatgtactgaaccgtcaggaaatggtgctgattggcatgctgttaattgcctcagttccggcgacctggatgctggtgggataacgttcatcccatcgttggatagcaaaggagataacgatgggtaaaacccagcccttgccaatattaattactggcggaggtcgtcgcatcggcctcgccctcgcatggcatttcattaatcaaaagcaaccggtgattgtcagctatcggacacactatccagccattgatggactgattaatgcaggtgcgcagtgtattcaggctgatttttcgaccaacgacggtgtgatggcgtttgccgatgaagtactaaaaagcacccatggtctgcgtgctattttgcataacgccagtgcgtggatggcggaaaaaccgggtgcgccactggccgacgtactggcttgcatgatgcagatccacgttaataccccatacctgctcaaccatgcgctggaaagattactgcgtgggcacggacacgccgccagcgatatcattcactttaccgattatgtggtggagcgcggtagcgacaaacatattgcgtatgctgcaagcaaagcggcactggataatatgacccgctcgtttgcccgcaagctggcaccggaagtgaaagtgaattctattgcgccatcgctgatcctgtttaatgaacatgatgatgccgaatatcgacaacaggcgctgaataaatcactgatgaaaaccgcgcctggcgagaaagaagtgatcgacctggtcgattacttacttaccagttgctttgtcaccggacgcagtttcccacttgatggcggtcgtcatctgcgttaatgcagctttatccagcatataatcaacacccatgcgcttatcccccaacacgcaacagaaccaacaaaagcggcgggcaagcgcatcattccggtgaaataccacagcgacaccaggtaaacaaaatagggaataatcgaccacatactaaaaatgatggttgcgcgtaaggcttcaatgccgcgttcgctggcaacaatataatgcgcgataagcgcaaaggtcgggaaaagtggaatcagcccggcgatataataatttttcgtttttgctaaaacaccaatcaacagcactaccagcgcaccgagcgcggctttgattaccagccccatctttttaccttaacacttccataacaagtcatcagtagaatacctgatgaaaacttgtttagaaacgattgatagtaagtaaaaacagcgcggtgtattgtgacgtttttatatctaccgtgaatgttatgaacactatcgtatttgtggaagatgatgcggaagtcggttcactgattgccgcgtacctggcaaaacatgatatgcaggttaccgtagagccgcgcggcgaccaggccgaagaaaccattttgcgagaaaatccggatttggtgttactcgacatcatgctaccaggcaaggacggcatgaccatttgtcgtgatttacgcgcaaagtggtctggaccgattgttcttctaacctctctcgatagcgatatgaaccacatcctggcactggaaatgggtgcctgcgactatattctcaaaacgacgccccctgctgttttgctagcgcgtttacgtttgcatttgcgtcagaatgagcaagccacactgaccaaaggtcttcaggaaacgtctctgactccctacaaagccctgcatttcggcacgttgaccatcgatcccatcaaccgcgtagtcaccctggctaacactgaaatctcgctctcgacagctgatttcgaattattgtgggaattagctacccatgccgggcaaatcatggaccgcgatgcattgctgaaaaatttacgcggcgtcagttatgacggactggatcgtagcgtggacgtggctatttcgcggttaagaaaaaaactgctcgataacgccgcagaaccttatcgcattaaaactgtgcgtaacaaaggctatctttttgcgcctcatgcatgggaataagcgatgaaaaaactgtttatccagttttacctgttattgtttgtctgcttccttgtgatgtctctgctggttgggctggtgtacaaatttaccgccgaacgcgcgggcaaacagtcgctggatgatttgatgaacagttcgctgtatctgatgcgcagcgaattgcgtgagatccccccacacgactggggtaaaactctgaaagagatggatttaaatctctctttcgatctgcgtgtcgagccactgagtaaataccatcttgatgatatttccatgcaccgactgcgtggcggcgaaattgtcgccctggacgatcagtacacgtttttgcagcgtatcccgcgcagccactacgtgctggcagttggtcctgttccttatctttattatctccatcagatgcgattgctggatatcgccctgatcgcttttattgctatttccctcgcctttccggtgtttatctggatgcgtccgcactggcaggatatgttaaaactggaagcagcggcgcaacgatttggcgatgggcatctcaatgaacgtatccactttgatgagggttcgagctttgaacgacttggcgtcgcatttaaccagatggcggacaatatcaacgccttaattgccagcaaaaaacagcttattgacggtatcgctcacgaactgcgaacaccgttagtgcgcctgcgttatcgactggagatgagcgataacctgagcgccgccgaatcccaggcgttgaatcgtgatatcagtcaacttgaagctttaattgaagagctgctgacttatgcccgactcgatcgcccacaaaacgagcttcatcttagcgaaccagacctgccgttgtggctgtcaacgcatctggcagatattcaggcagtaacgcccgataaaacggtacggataaaaacgctcgtgcaaggccattatgcggcgttggatatgcgcttaatggagcgcgtgctggataatttgctcaataacgccctgcggtactgccattcaacggttgaaaccagcctgctactgtcggggaatagagcgacattaattgttgaggatgatggcccagggattgccccagaaaaccgcgaacatatctttgaaccttttgttcgcctcgatcccagccgggatcgctcaaccggcggctgcgggctggggctggcaattgtccactctatagcactggcaatgggcggtacggttaattgtgacaccagcgaactgggtggtgcccgcttctcgtttagctggccgttatggcataacatcccgcaatttacctctgcctgacactacgcgcacgatggtcaagtcaccacgactgtgctataaaataagtatgttgtaactaaagtggttaatattatggcgcgttacgatctcgtagaccgactcaacactacctttcgccagatggaacaagagctggctatatttgccgctcatcttgagcaacacaagctattggttgcccgcgtgttctctttgccggaggtaaaaaaagaggatgagcataatccgcttaatcgtattgaggtaaaacaacatctcggcaacgacgcgcagtcgctggcgttgcgtcatttccgccatttatttattcaacaacagtccgaaaatcgcagcagcaaggccgctgtccgtctgcctggcgtgttgtgttaccaggtcgataacctttcgcaagcagcgttggtcagtcatattcagcacatcaataaactcaagaccacgttcgagcatatcgtcacggttgaatcagaactccccaccgcggcacgttttgaatgggtgcatcgtcatttgccggggctgatcacccttaatgcttaccgcacgctcaccgttctgcacgaccccgccactttacgctttggttgggctaataaacatatcattaagaatttacatcgtgatgaagtcctggcacagctggaaaaaagcctgaaatcaccacgcagtgtcgcaccgtggacgcgcgaggagtggcaaagaaaactggagcgagagtatcaggatatcgctgccctgccacagaacgcgaagttaaaaatcaaacgtccggtgaaggtgcagccgattgcccgcgtctggtacaaaggagatcaaaaacaagtccaacacgcctgccctacaccactgattgcactgattaatcgggataatggcgcgggcgtgccggacgttggtgagttgttaaattacgatgccgacaatgtgcagcaccgttataaacctcaggcgcagccgcttcgtttgatcattccacggctgcacctgtatgttgcagattaacgcccggctttcatactgccgaccatctgttctggccgtacccagctgtcaaactcggcttcgctaagataccccagcgcaagggccgcagcttttaaggtcagcccttctttatgcgcttttttggcgatctcggcggctttgtcataaccaatgtgggtgttaagcgcagtcaccagcatcagcgattcattgagtaattgattgattcgctcacgattcggttcaatacccactgcgcagtgtttgttaaaactttccatgccatctgccagcaagcgcaccgattgcaggaaattgtggatcaccattggacggaagacgttcagttcaaagttaccggaagcgccccccatgttgatcgccacgtcgttccccatcacctgacagcagagcatggttaatgcctcacactgtgttgggttcactttccccggcatgattgagctgcccggctcattttccgggattgagatttcaccaattccgcagcgcgggccagaggccagccagcggacatcattggcgattttcatcagtgacgcagccaaccctttcaacgcgccgtgcgcctgaaccagggcatcacaggtcgccagcgcttcaaatttgttcggcgcggtaacaaacggtgcacaggtaatgactgccagttcatctgctacgcgacgcgcatactccggatgggtatttagtccagtacccaccgctgtaccgccaagagccagttccgctacgtgaggcaggctgtattcgatatgtttgagattatgctcgagcatcgctacccagccggaaatctcctgccccagcgttaacggcgtggcatcctgcaagtgagtacgaccaattttgacgatatcggcaaaagcacgggatttctcattcagtgtctgtgtcagggttttaagctgaggaatgagttgcttgcgcagcgccagcagcgccgcaacgtgcatcgccgtcggaaagacatcgttggaactttggcttttgttcacgtcgtcgttagggtgaactttacgttccatcccgcgcacaccgccgagtaattcactggcccggttagccagcacttcgttcatgttcatgttactttgcgtgccggagccggtctgccagatagccagcgggaattcgtcgtcatgctgtcctgccagtacttcatccgccgcctgacgaatggcgctcgctttctcttcagacaacaagcctaaatcttcattaacttttgccgctgcacgcttggttagcgccagcgcatgaatcagtgaggtgggcattttctccgtcgaaatgcggaaatgctccagcgagcgttgagtttgtgcgccccacagcttatctgccgggacatcaatcgcccccatcgaatctttttcgctgcgtactgtattcatgacctgctcctcacctgattaattttttctttctgttttgctttcgttaagcaacttttagctcacttattatttaccatttgataacaaatgtttggtctttcgtgccatgtaaaaaaaccgccccgaagggcggctctgtttatttcacacagcgggtgcattgtgtgagttgtatctgctggaagaagtcatttcctttatcatccacaaggataaacgccgggaaatcttccacttcaattttccagatggcttccattcccagttccggatattcaacacattccaggctcttaatacttccctgcgccaatacagcggccggaccaccgatactgccaaggtagaagccgccgtgttttttacaggcatccgtcacctgctggctgcggttgcctttcgccagcatgatcatacttccgccctgcgcttgcagttgatcgacataagaatccatccgtccggcggtcgttgggccaagagaaccggaggcataaccttccggcgttttggccggacccgcgtagtaaatcggatgatctttgatgtactgcggcagcccttcaccgttatccatccgctctttcagtttggcgtgagcaatatcacgaccgacgataatcgtgccgttaagcgataagcgtgtagaaacgggatactgcgacaactgtgcgaggatctctttcatcggacggttaaggtcaacgcgcaccgcttcgccttctcccgctttgcgcagctcttccgggatatatttgcctggattatgttccagtttttcgatccagatcccctgacggttgatcttcgctttgatattacggtcagcagagcaggagacgcccataccgaccgggcaggatgcgccgtgacgtggcaggcgaatcacgcggatgtcgtgagcgaagtatttaccaccaaactgcgcacccagaccaagattttgcgcttcgatcagcaattctttttccagttccacatcgcggaacgcctgaccgtgctcattcccttccgttggcagttcatcatagtatttcgcggaagccagtttcaccgttttaaggttcgtttctgcagaagttccaccaataacgaacgcaatatgatacggaggacaggccgccgtacccagcgtgcgcatcttctcaaccaggtaatttttcagtttccccggcgtcagtaacgctttggtttcctgatagagatacgtcttgtttgccgaaccaccacctttggcgatacagaggaatttgtattcgtcgccatcaacggcataaagatcgatctgcgctggcagattggtgccggtattcacttctttatacatatccagcggcgcgttttgcgagtagcgcagattatcttcgatataagtgttatagacaccgcgcgccagcgccgcttcatcaccaccaccggtccatacacgctgcccttttttaccaacaataatcgcggtgccggtatcctgacaggttggcagaacgcctttcgccgcgatgtcggagttacgcaggaattgcagcgccacatatttatcattttcgctggcctccgggtcacgcagaatgtcggccacctgttgttggtgcgccggacgcagcatgaacgacgcatcatgaaacgcctggcgcgccaacagagttaacgcttcgggtgcgactttcaaaatctcctgcccttcaaattcagatacgctaacgtgttcgctggttagcaggtaatactcagtatcatcttttttgagtggaaaaggagcctgataatgaaagggtttgtttgacattgttctctcacttactgcctggtttggttatgctctgggcgggtgttccgttgccctgttaaaagcgagtaacaatatcctacacacttttttaacaaaaactgagactagtacgactttttgcggctccaggttacttcccgtaggattcttgctttaatagtgggattaatttccacattaaaacagggattgatcatgcaaaaactcattaactcagtgcaaaactatgcctggggcagcaaaacggcgttgactgaactttatggtatggaaaatccgtccagccagccgatggccgagctgtggatgggcgcacatccgaaaagcagttcacgagtgcagaatgccgccggagatatcgtttcactgcgtgatgtgattgagagtgataaatcgactctgctcggagaggccgttgccaaacgctttggcgaactgcctttcctgttcaaagtattatgcgcagcacagccactctccattcaggttcatccaaacaaacacaattctgaaatcggttttgccaaagaaaatgccgcaggtatcccgatggatgccgccgagcgtaactataaagatcctaaccacaagccggagctggtttttgcgctgacgcctttccttgcgatgaacgcgtttcgtgaattttccgagattgtctccctactccagccggtcgcaggtgcacatccggcgattgctcactttttacaacagcctgatgccgaacgtttaagcgaactgttcgccagcctgttgaatatgcagggtgaagaaaaatcccgcgcgctggcgattttaaaatcggccctcgatagccagcagggtgaaccgtggcaaacgattcgtttaatttctgaattttacccggaagacagcggtctgttctccccgctattgctgaatgtggtgaaattgaaccctggcgaagcgatgttcctgttcgctgaaacaccgcacgcttacctgcaaggcgtggcgctggaagtgatggcaaactccgataacgtgctgcgtgcgggtctgacgcctaaatacattgatattccggaactggttgccaatgtgaaattcgaagccaaaccggctaaccagttgttgacccagccggtgaaacaaggtgcagaactggacttcccgattccagtggatgattttgccttctcgctgcatgaccttagtgataaagaaaccaccattagccagcagagtgccgccattttgttctgcgtcgaaggcgatgcaacgttgtggaaaggttctcagcagttacagcttaaaccgggtgaatcagcgtttattgccgccaacgaatcaccggtgactgtcaaaggccacggccgtttagcgcgtgtttacaacaagctgtaagagcttactgaaaaaattaacatctcttgctaagcttattaaaggcttataacaccttcaggcggccagtccgcctgatttcattttatggataatcattatgaataaatcgctggtagcggtaggcgtcattgttgcgctaggcgtagtctggacaggcggcgcatggtatacaggcaagaagattgaaacccatctcgaagacatggtcgcgcaggcgaacgcgcaactcaaactgacagctcctgaatccaacctggaagtgagttatcaaaactatcatcgcggcgtattcagcagccagttgcaactgttggtgaaacccattgccgggaaagaaaatccgtggattaaaagcggtcagagcgtcatcttcaacgaatcggttgatcatggtcccttcccgcttgcccagcttaaaaaactgaacctgatcccgtcgatggcatcaattcaaaccacgctggttaataacgaagtaagcaaaccactgtttgatatggcaaaaggtgaaacgccttttgagattaactcgcgcattggttacagcggtgattccagttccgatatttcgctcaagccactgaattacgagcaaaaggatgaaaaagtcgcctttagcggcggcgagttccagttaaatgctgacagagacggcaaagccatctccctttccggggaggcgcaaagtggtcggatagacgcagttaacgaatacaaccagaaagtgcagttgacctttaataatctgaaaaccgacggttccagcacgctggcaagttttggtgagcgtgtaggaaatcaaaaactgtcactggaaaaaatgaccatttcagtggaaggcaaagaactggcactgctggaaggcatggagatcagcggtaaatcggatctggtcaatgacggtaaaacgatcaatagccaactggattactcgctaaacagcctgaaggtacagaatcaggatctgggcagcggcaagctgactttaaaagtcggccagattgatggtgaagcctggcatcagtttagccagcaatataacgcgcaaactcaggcgctgctggcacagccagaaattgccaacaaccccgaactttatcaggagaaagtgacggaagccttctttagcgccctgccgctgatgctgaaaggcgatccggtgattactatcgcgccgctaagctggaaaaacagtcagggtgaaagtgccctgaatctgtcgctgttcctgaaagatccggcaacgactaaagaagcgccgcaaacgctggcgcaggaagtagatcgttcggttaaatctctggatgcgaaactgaccattccggtggatatggcaactgagtttatgactcaggtagcgaagctggaaggttatcaggaagatcaagcgaaaaaactggcgaaacagcaagttgaaggtgcatcagcaatggggcagatgttccgtctgaccaccttgcaggacaataccatcaccaccagcctgcaatatgctaacggtcagataacgttaaatgggcagaaaatgtcgttagaagattttgttggcatgtttgcgatgccagctcttaacgttccggctgtaccggcaattccgcagcagtaattcacggccaaaacgccggagaattttcactccggcgttttcatctgaaaacaaaccagagattgcctgatgcgctacgcttatcaggcctaccttttcctgcaacactttgaatttatgagtttttgtaggctggataaggcgtttacgccgcatccggcataaaaaacgcgcactttgtcaacaatctgaaacgccggagatttttctctccggcgttattttttacttcagcataaagtcatactgaatactcattttcacatcccagtaattcaggcgatcgcccagcgtactgccatcgcgcttttcccgccctttatcggcagcaagaaagaaattcatcccttgtaacggcccttcgctgacccgatagttcataccacctaagatacccgtgccttcaatccgcacatctcgtttactggattcatagccgcgagtcacaatcggtgcaaatgtcagcgtaaattgcggcgttaaacgatagttgacgcccaattgccaggactgcattccttcacggttacgatcaagacttaatgaaaagggatagccaatgtcggtatccaccacggcaccattcattgcatggcgcaaataaccaccactgccaaatacacttccccacggcgcattccaggtcaattgtccactaaccaacgccgtttcattgggctggctggtattacgacttaaaccttcgagctgcgcgtaaaagccgagcaactcccctttcaacgtataattcgggtcgagcggtatgcttttctcgagaatactttgtatctgattggaaacatctttctgtaccgatgcccccagagaatagcgactggtatcatcatgccaactggcggctaaaaaagaacgtgcgcgatgtttatcgtattttcccgtctggctgttatacaccccttcatcacgaataccggttgttgaatcagtccataaaaatactcgtgaacgccacattccccacagatcaatatttggtgttaaagcccaataacctaatgctccttcagaaactgtcggtaatgtacgttgcgaactgccagccattaacggaatacgataaggtaagctaccataactataatccgtcccgaagcgacctaatttaagcaggctattttcactgggttttatttttactgcccccagggcaaagccaaaacttttatcaccatcaagataccaccgggtactcatatcagcacgagcacctaatttataaacataatacgccccgccttcaacgccaataatattggaataataaccactattgaaatcgagcaatcctccctgtacccatgcgtaaatatctcttcccgcgccagcactgggcttatccgccctgcgcaattcgtttttcagtctgatgcgtagtcccgcttcatcgtcagccagttgcgccgcataagcagaggtaaggccagaggcagccgtcaggcaaataacggccatggccactatttttctcatagttgcacctttgatgttctgattatttttattgaatattaattagtgatatcgctgattaattgctgctgcacttttttacgattatcaatttcaaccacgatttctttgaattttttatccgtgagcggataaaaccagataataacgaatgccagtagcataaatccgcaaggtactaaggcaattgatgtgcggatgcccataataacttccggcgtttgcacctgattggcgatatatccgcttaaccccaaaataaaggcaggaattgaacctccgattgcctgaccgcatttacgggtaaatgagaatagtgaataggtgagcccttcaattcgcacgccggtcaggtattcaccgtattctacggtatcagcttccagcgcccacatcacggtcatggtaacgccctgaccaattgaagcgatggccaacgcaaccaacgccaccggcagtgaccagacggaaacccagaagaacagcagataaccgcaggttcccagcaaagcgccaatcaggaaggtattctttttaccgatcctcgcgaccatccccggcaccagcggtgccgatgccacagtaccaaccaggttttgcaccagtaccagcacagtgaacagcccggtatcatttaacacatagcgcacgtagaacaacgacgaggcgctgaccgcaaaggtcgaaatcagcacacacagcgcaccgatgcacaacataaacagcgggcgattccgtttcagggtttgcagactgatattcaatgacggctgcgcaacgatacgtaccacattctcacgcgtcgatttgaagcagatgaagtaaagcaccattccggcaatcgccagcacaattgtccagaaatggtataccgacaccatctcttccgggctggagttcttaatgctcggtcctatcagaaatgccaggcagacaaaggtcaatgaagcggcaatcccacgagccgcgcccagacgggcgcgggattgtggttgttgggtcatcgcggtagcaagtgaaccataaggaatattcaccaggctgtagcaaagcccgaggcccatgtaggtcaaatatgcatacaccactttgctaccatggctccagtcggtcagcacccagaataccagcacgctgaagatcattaacggcgcagtaccgaagagtaaaaacgggcggaattttccccagcgggtattcacactgtccaccactcgtccggcaaagacgtcggcgaaggcatcgaatacccgcaccagtaacagcatggtgcccgccgcagcggcaccgacgccagcgacgtcggtgtagtaactcaacaggaagagcgcccccattgcgaaggcgaagttattggcgacgtcaccgaggctgtagccgacgatggtgcgccaggagagttgttgattcattgtttgcctccctgctgcggtttttcaccgaagttcatgccagtccagcgtttttgcagcagaaaagccgccgacttcggtttgcggtcgcgagtgaagatccctttcttgttaccgccaacgcgcaatatgccttgcgaggtcgcaaaatcggcgaaattccatacctgttcaccgacgacggcgctgacgcgatcaaagacgcggtgatacatatccagccatgcacactgatactcttcactccacatgtcggtgtacattgagtgcagcccggctaacgtatccacgccgtattcggtgatgataatcggctgatgcagtttctcctgccaggccagaagttctttttccagtaccttctctgccgtttccaaatcgccgctttggacataccatccgtaataacggttcaggcacagcacatcaaagagatcgctgatggtatcggtgtgagcgtcgcagaacattacattgacgcaggtgatcggacgcgtcgggtcgagtttacgcgttgcttccgccagtggcgcgaaatattcccgtgcaccttgcggacgggtatccggttcgttggcaatactccacatcaccacgcttgggtggtttttgtcacgcgctatcagctctttaatcgcctgtaagtgcgcttgctgagtttccccgttgactgcctcttcgctgtacagttctttcggcttgttgcccgcttcgaaaccaatgcctaaagagaggttaaagccgacagcagcagtttcatcaatcaccacgatgccatgttcatctgcccagtcgagcatctcttcagcgtaagggtaatgcgaggtacggtaggagttggccccaatccagtccattaatgcgtggtcgtgcaccatcagcacgttatcgaatcctttgccacgcaagtccgcatcttcatgacgaccaaagccagtaaagtagaacggtttgtggttaatcaggaactgttcgcccttcactgccactgaccggatgccgacgcgaagcgggtagatatcacactctgtctggcttttggctgtgacgcacagttcatagagataaccttcacccggttgccagaggtgcggattcaccacttgcaaagtcccgctagtgccttgtccagttgcaaccacctgttgatccgcatcacgcagttcaacgctgacatcaccattggccaccacctgccagtcaacagacgcgtggttacagtcttgcgcgacatgcgtcaccacggtgatatcgtccacccaggtgttcggcgtggtgtagagcattacgctgcgatggatcccggcatagttaaagaaatcatggaagtaagactgctttttcttgccgttttcgtcggtaatcaccattcccggcgggatagtctgccagttcagttcgttgttcacacaaacggtgatacgtacacttttcccggcaataacatacggcgtgacatcggcttcaaatggcgtatagccgccctgatgctccatcacttcctgattattgacccacactttgccgtaatgagtgaccgcatcgaaacgcagcacgatacgctggcctgcccaacctttcggtataaagacttcgcgctgataccagacgttgcccgcataattacgaatatctgcatcggcgaactgatcgttaaaactgcctggcacagcaattgcccggctttcttgtaacgcgctttcccaccaacgctgatcaattccacagttttcgcgatccagactgaatgcccacaggccgtcgagttttttgatttcacgggttggggtttctacaggacgtaacataagggactcctcattaagataataatactggtcaacctttaatctgattagttaaccaattctgtgttgcacacagttatctgtgagaaacccatggaagagaaatggaaataaaaagaactgacaccgcgatcaaaaaaccaaaaactgcaatacccacagcgtgatatagatcgcattaatctttaaaacagcgttgacagaagccataaaataagcaaccgaacgttcgttcgagcgtattgggaacgataaactctcatgacatatggctacagtgaatattttggggggaattctccgaagccgggaaggataatttttgcacagagaaattacgatatgaaacgcgggcacagttatcaccagcccgccgaaaaagagagagaatcaggatgcggttaagataccgccaatcatcgcgcgtaatccctgagcaaacgacgcttcacgcgccaggtcttccgcttcgatatcggccagtacaccgtaggtcagatccagcagtaaacgtgaagtcattgccgtgttgatgtctgggcttatctcgcctttttgctgggcatcacgcatccgctgggcaacaaattccgtgatcgtcatatgcttatttttaagcatggcggcgacctgtgggttacgcatcccttccgccataatttcaaccaccagcgcccgttgtccaaaggcttcatgggtgagagagacaatggactcgaccatatagtcaacgaaatgaatcccttcaatcggttcccggaaacgggccagcgccctctcctggtcctgtaagataatcgcctgaatcaaggcttctttggagatgaaatggtgatagagcgtcccgggactaatggcgcaagatttacagatggctttcatcgaggcactgtgaaatccattttctgaaaaaatctctctggcagcattgaggatccgggtccgtgtcggttgtgcttcagtctgcatgttatccatcattaaaccattatagttagcgtgaataactagtttaccgcgttgtcaggtgagcgcctatcattgctgttgaatagtgcgaaggcacactctattcgtatacttttcactctgaaattggttaaccaatagccgtgatttggctgccagttatttagcagagacgttgatgagtttatcccggtaaacaacacgcacggttgtttaccggtccgttagtgtattaattgagctcctgtaccccaccaccggagacggtgagaatttgtccgcttacccagctcgcagcaggcgagcaaaggaacagcgctgcgttagcaatatcttgcggttggcccagacgtctgatcggcgtgtgctgtaacattttttgttcaatttctggtgtaataacggatttcagggcatcggttaatattgcccccggcgcaatgccatttacccgaatatttttttcacccaggtcaaacgccatatttctgaccagatgactggccgcagctttagatgatgcataggaagtcatgtttatatttttattttctgccgccatagaagtgatggtcagaataacgccaccgccatttttttccatttctggcgcaacaagttgtgacagatggaaaaaagaaaacacattcagttcataagcacggcgaaaatccgccattggcatatcaaacggtttaggtccaccgccaccggcgttgttaaccagaatatcaactttacccagcttactgatagcaaagtctgccagtgcagagagttcctgttcggaagtaatatcacaacggcaggcaaatgcctgaccacccagttgttgaatttcgtctacaacatggttagctgcgtcggcgttaatatcactgaccaccacagatgcgccagctgtcgcgaatgtaatggcgatttctttaccaatacctgcacccgcacctgtgatgatggcgcattttccgtcgagtctcaggttgtcagaattaaacacataaacctcctgtgaacttcagtaaaaataaaaggcaccgcctgtgtgccacattttttatcattaaccttgaggaaaggacactaccaggtatagcagataaagagaggattatttcgctgcaatgagccgggcgggaataataagattgcgtgaatgcgtctcttcatgggtgattttttgcatcatgcgatccgcaagtgtgataccaagttcccgcgctggcgtgctggcccaggtaacaggtatatcatcaagtgtggttggtgtcgcatcggtaaatgccgccagcgaaacctgttgctcaaagtaacgatcgactccgctttccccgctttgccgccctgctttgagcaaaccaaaccatgcccccatcgcaatagtttcgttatagcaaaccacggcactgatggtcgggttatgacgtaaaagcgccgtgatagcttccgcggcttgcttctggctggaagtgcactccaacacccaatcgctatgaaacggcaggccaaattttagtagagttgcacaatagcccccaacccgttctgcacgggttaatgaggaactttgccctcccagccaggcgatccgctgatgcccattgcgaatgagatgctccgtcaacaactgtgcagcctgcatgttgtccgggcgaaccgtatcaacatcatcaagataactggcacgggaagcgaaaatcaccgggatagctttttcttctgccatccgtcgcaggtcatcgctacttcctgcagctccggcaattaccacaccatcgacaccctgattcagtaacagtgaaaaccgctgtgccagctgctcaccgtctttaccgccgtgaagcaaaaaaaccatccgtccctgcgcttccagagcttccgtcaatccggccgtcaattcggcgtaaaacggcgcagataaatcacggacgatcaaaccaatgacgccgctttgcccgccgcgcagcgccgacgcctggcgattgcgcacaaatcccagctcttcaatggcggcgttaacgcgttctcctgtggcggtagagattcgccctttgccactaagcaccagcgaaacggtacttaccgacacgcccgcagccagcgcaacatcatgaatggttatttttttggcggtagccatgcagatgacctactccctgattatgtgacagataaaacgttttaccttttatttatcttatacccgctattatcgttgcgtaatgtgatttatgcctcactaaaatttgataaaacgttttatcttctcgcgcaatttactgaatccagattgttctctacgaggagtcgttttatgacggcgaaaacagcaccgaaagtcacgctgtgggagttcttccagcagttaggcaaaaccttcatgttacccgtggcattattgtcgttctgcggcattatgctcggcattggtagttctcttagcagccatgatgtcataaccctgatcccggtcctgggcaaccccgtgttgcaggctatctttacctggatgagtaagattggctcgtttgcttttagtttcctgcctgtcatgttctgtatcgccatcccgctgggcctggcacgcgaaaataaaggcgtagcggcattcgctggcttcatcggttatgcggtaatgaacctcgcggtaaacttctggttgaccaataaaggcattctgccaaccacggatgccgcggttctgaaagccaataacatccagagcattcttgggatccagtcgatcgataccgggatcctcggtgcggtgatcgccggtattatcgtctggatgctgcatgagcgtttccataatatccgcctgccggatgcgctggcattcttcggcggtacgcgcttcgtaccaattatctcctcgctggtgatgggccttgtcggcctggtgattccattagtctggccgattttcgccatgggtattagcggcttgggccatatgataaacagcgcgggtgatttcggaccgatgctgtttggtaccggtgaacgtctgctgttgccgtttggtctgcatcacattctggtggcattaattcgctttaccgacgcaggcggcacgcaggaagtctgcggtcaaaccgtcagcggcgcactgaccatcttccaggcgcaattgagttgcccgaccactcacggtttttctgaaagcgccacgcgtttcctttcgcaaggtaaaatgcctgcgtttctcggcggtctgccaggtgcagcgttagctatgtatcactgcgcgcgcccggaaaatcgccataaaattaaaggtctgctgatttctggcctgatcgcctgcgtcgttggcggcactaccgaaccgctggaattcctgttcctgttcgtagcgccagttctgtatgtcatccacgcgctgttaaccggcctcggcttcaccgtcatgtctgtgctcggcgtcaccatcggtaataccgacggcaatatcatcgacttcgtggtgttcggtattttgcatggtctgtcaaccaagtggtacatggtgccagtggtggcggcaatctggtttgtcgtttactacgtcatcttccgtttcgctatcacccgcttcaatctgaaaaccccggggcgcgatagcgaagttgccagctcaatcgaaaaagccgttgccggtgcgccgggtaaatcaggttacaacgttcctgcaatcctcgaagcattaggcggtgccgacaatattgtcagcctcgataactgcattacccgtctgcgtttgtctgtgaaagatatgtcgcttgttaatgtgcaggcactgaaggacaatcgggcaattggcgtagtacaacttaatcaacataacctgcaggttgttatcgggccacaagttcagtcagtaaaagatgaaatggccggtctgatgcatactgtccaggcataaggataagatatgttcgatttttcaaaggtcgtggatcgtcatggcacatggtgtacacagtgggattatgtcgctgaccgtttcggcactgctgacctgttaccgttcacgatttcagacatggattttgccactgccccctgcattatcgaggcgctgaatcagcgcctgatgcacggcgtatttggctacagccgctggaaaaacgatgagtttctcgcggctattgcccactggttttccacccagcattacaccgccatcgattctcagacggtggtgtatggcccttctgtcatctatatggtttcagaactgattcgtcagtggtctgaaacaggtgaaggcgtggtgatccacacacccgcctatgacgcattttacaaggccattgaaggtaaccagcgcacagtaatgcccgttgctttagagaagcaggctgatggttggttttgcgatatgggcaagttggaagccgtgttggcgaaaccagaatgtaaaattatgctcctgtgtagcccacagaatcctaccgggaaagtgtggacgtgcgatgagctggagatcatggctgacctgtgcgagcgtcatggtgtgcgggttatttccgatgaaatccatatggatatggtttggggcgagcagccgcatattccctggagtaatgtggctcgcggagactgggcgttgctaacgtcgggctcgaaaagtttcaatattcccgccctgaccggtgcttacgggattatagaaaatagcagtagccgcgatgcctatttatcggcactgaaaggccgtgatgggctttcttccccttcggtactggcgttaactgcccatatcgccgcctatcagcaaggcgcgccgtggctggatgccttacgcatctatctgaaagataacctgacgtatatcgcagataaaatgaacgccgcgtttcctgaactcaactggcagatcccacaatccacttatctggcatggcttgatttacgtccgttgaatattgacgacaacgcgttgcaaaaagcacttatcgaacaagaaaaagtcgcgatcatgccggggtatacctacggtgaagaaggtcgtggttttgtccgtctcaatgccggctgcccacgttcgaaactggaaaaaggtgtggctggattaattaacgccatccgcgctgttcgttaaccccaattgcgcaacgtaaaaaatcgttgcgcaatcgtggatttttaccctgctttgtttttataatggtgcgcacttttatatccagaaaaagagtgcgaccatgattgataccaccctgccattaactgatatccatcgccaccttgatggcaacattcgtccccagaccattcttgaacttggccgccagtataatatctcgcttcctgcacaatccctggaaacactgattccccacgttcaggtcattgccaacgaacccgatctggtgagctttctgaccaaacttgactggggcgttaaagttctcgcctctcttgatgcctgtcgccgcgtggcatttgaaaacattgaagatgcagcccgtcacggcctgcactatgtcgagctgcgtttttcaccaggctacatggcaatggcacatcagctgcctgtagcgggtgttgtcgaagcggtgatcgatggcgtacgtgaaggttgccgcacctttggtgtgcaggcgaagcttatcggcattatgagccggaccttcggcgaagccgcctgtcagcaagagctggaggcctttttagcccaccgtgaccagattaccgcacttgatttagccggtgatgaacttggtttcccgggaagtctgttcctttctcacttcaaccgcgcgcgtgatgcgggctggcatattaccgtccatgcaggcgaagctgccgggccggaaagcatctggcaggcgattcgtgaactgggtgcggagcgtattggacatggcgtaaaagccattgaagatcgggcgctgatggattttctcgccgagcaacaaattggtattgaatcctgtctgacctccaatattcagaccagcaccgtagcagagctggctgcacatccgctgaaaacgttccttgagcatggcattcgtgccagcattaacactgacgatcccggcgtacagggagtggatatcattcacgaatataccgttgccgcgccagctgctgggttatcccgcgagcaaatccgccaggcacagattaatggtctggaaatggctttcctcagcgctgaggaaaaacgcgcactgcgagaaaaagtcgccgcgaagtaacaaaatggatggtgcaaatgcaccatccatttttcatgcaaggcacaaagtcgcgcgatgtttggcggattcgatgcccagctcaatcaactccattacctggattgcctggcttgccggaaccggattttcaccatcgccatttaacgcatcacgaatagccgcatagtaagccggataattcccaggcaccgtcaacagcgtttcttcgacacgttcctcaccttccacgcgggtaagtacgccatcacgcatatcgtagccccagtcttcctgcggtagacgctcgccatttttcagacgttcttcctgtggatcgaggccatatttcacataactgcctcgggatccatgcacgatataccgtgctgactcagcggctgccagcatggtaccgtgtaaaatgactcgccgctgtggataggacaagatggcgtggaaataatcggtcgactgcgctccgggccgtaactgtgccaaatctaccgtcatgctgaccggtaaaccaaaaagcgtaatggcctgatcaagaagatgtggtgctaaatcgtaccagataccgctgcctgggccgccctgttcacgccaacgatcgcgcacctgcggacggaagcggtcaaaatgagactcaaagtaagcaacttcacccagcacgccttccgcgagtaaaccttttagcgtcaagaaatcgctatcccagcgacggttatggaatacagacagcacacgccccaggctttttgccagcgcatccagctctcgcgcttgtgacagtgtcacggtaaagggtttatcaacgaccacatgtttacccgcctcaagcgccgctttggctaacgggaaatgggtatcgttgggtgtaggaatgacaatcaggtctatgttgggatcgttaaacagatgcttcggctcagagacaaccgtaaccgttggccagtcggcttttacttttgtttcatcactgctggagattaccgccagttcctgcccgggcgtgcccgcaatcaggggcgcatggaaggttttgctcgcataaccatacccaatcaacccaacacggatgttgtcgctcatgtcattgcctctcattgaagtatgatggctatttgacactatcctttacccacgctcaacagtttaataacctgccagcaataagggatgttgtttaacttaagtcaaaaaaatagcgaattttccaacgacaaaagctaaatatcgcaaaaacctcagtaaaaatcttgctggagctattattgctaagtaacatttaccccctgaagttaatggatcaatcaagagagatgtgggctgtaatgaatcgtcttattgaattaacaggttggatcgttcttgtcgtttcagtcattcttcttggcgtggcgagtcacattgacaactatcagccacctgaacagagtgcttcggtacaacacaagtaagctctgcacttgtggagcgacatgctgcccgtccgggtgcatgttttcacttgtcggatattaaaccaggaatttattatcttgttcgatgttgttggtgattgtcagggatagtaaagcgcgttactcttttcagagcagtttttcatccctgaatatttgccatcagcgcattcttattattgtaataacacaagcgttcacttttggtgaaattttatcatcactaataatacctacccctttggtattaattattttatggaccttttatgactgttcaggactacttattaaaatttcgcaaaatcagttcactcgaaagtctggaaaaactctacgaccatcttaattacaccctgacggacgatcaggaactgatcaatatgtatcgtgctgccgatcaccgtcgcgcagagctggtttctggcgggcgtttgtttgacctcggccaggtaccgaagtccgtctggcactatgtccaataaagaaagtagcgatcggttataaaagccttataataacgcccctaaaattagatttgcctgtttgcgtcgctattctggagaacctatgaccaccacaacgccacaacgtattggaggctggttgcttggcccgttggcctggcttttagtcgctctgttgagtacgacgctggcgttgttgctgtataccgctgcgttatcttctccgcaaacatttcaaacgctcggcggacaagcactgacgacacaaatcttatggggcgtttcttttattaccgctatcgccttgtggtattacacactgtggttgaccatcgctttctttaaacgtcggcgttgtgttcctaaacactatattatctggctgcttatttccgtattgctggcagtaaaagcattcgctttttcacccgtggaagatggcatagccgttcgccagttgctgtttactttgttggcaaccgcattgatcgtcccctatttcaaacgctcgtcgcgggtaaaagcgacgtttgtgaatccgtaataaccttacagttaacctgttgtcgcctgctctggattaacggataataggcggcttttttatttcaggccgaaaaatgactgactacctgttactgtttgtcggaactgtactggtcaataactttgtactggtcaagtttctcggtctctgtccgtttatgggggtttccaaaaaactggaaaccgcgatgggcatggggctggcaacaacgtttgtgatgacgctggcgtctatttgcgcctggcttatcgatacgtggattttgatcccacttaatctgatttacctgcgcaccctggcatttattctggtgattgctgtggtcgtgcagttcaccgagatggtggtgcgcaaaaccagcccggtgctttaccgtctgctggggatttttttgccgcttatcaccaccaactgtgcagtgctcggcgtggcgttgctgaatatcaatctcgggcacaatttcttgcagtcggcgctgtacggtttttccgccgctgtcggtttctcgctggtgatggtgctcttcgccgccatccgcgaacgccttgctgtggctgatgtcccggcaccttttcgcggtaatgccattgcgttaattaccgcaggtcttatgtctctggcctttatgggctttagtggtttggtgaagttgtaatgaatgctatctggattgccgttgccgccgtgagcctgctgggcctggcgtttggcgccattctgggttatgcctcccgccgttttgcggtggaagacgatccggtcgttgagaaaattgacgaaatcttaccgcagagccagtgtggtcagtgcggttatcccggctgtcgcccctacgcggaagccatcagctgtaacggtgaaaaaatcaaccgttgcgccccaggtggcgaagctgtgatgctaaaaattgccgagttgcttaatgtcgagccgcagccgctggatggcgaagcgcaagagataacgcctgcgcggatggtggcggttattgatgaaaataactgtattggctgcactaaatgtattcaggcgtgtccggtagacgccatcgttggcgctacccgtgccatgcatacggtaatgagtgatctctgtacgggctgcaatttatgtgttgatccgtgcccgacgcactgcatctcgttgcaaccggtcgcagaaacacctgactcctggaaatgggatctgaacaccattcccgtgcgtatcattcccgtggaacaccatgcttaagttattctctgcattcagaaaaaataaaatctgggatttcaacggcggcatccatccaccggagatgaaaacccagtccaacggtacacccctgcgccaggtacccctggcgcagcgttttgttattccactgaaacagcatattggcgctgaaggtgagttgtgcgttagcgtcggcgataaagtattgcgcggccagccgcttacccgtggtcgcggcaaaatgctgcctgttcacgcgcccacctcgggtaccgttacggctattgcgccccactctacggctcatccttcagctttagctgaattaagcgtgattattgatgccgatggtgaagactgctggatcccgcgcgacggctgggccgattatcgcactcgcagtcgcgaagagttaatcgagcgcatacatcagtttggtgttgccgggctgggcggtgcaggattcccgacaggcgttaaattgcagggtggcggagataagattgaaacgttgattatcaacgcggctgagtgcgagccgtacattaccgccgatgaccgtttgatgcaggattgcgcggctcaggtcgtagagggtattcgcattcttgcgcatattctgcagccacgcgaaattcttatcggcattgaagataacaaaccgcaggcgatttccatgctgcgcgcggtgctggcggactctaacgatatttctctgcgggtgattccaaccaaatatccttctggcggtgctaaacaattaacctacattctgaccgggaagcaggttccacatggcgggcgttcatccgatatcggcgtattaatgcaaaacgtcggcactgcttatgcagtgaaacgtgccgttattgatggcgagccgattaccgagcgtgttgtaaccctgactggcgaagcaatcgctcgcccgggcaacgtctgggcacggctggggacgccagtgcgtcatttattgaatgatgccggattctgcccctctgccgatcaaatggtgattatgggtggcccgctaatgggctttaccttgccatggctggatgtcccggtcgtaaagattaccaactgtctgttggctccctctgccaatgaacttggcgaaccacaggaagaacaaagctgcatccggtgtagcgcctgtgctgacgcctgccctgcggatcttttgccgcaacagttgtactggttcagcaaaggtcagcaacacgataaagctaccacgcataacattgctgattgcattgaatgtggggcttgcgcgtgggtttgcccgagcaatattcccctggtgcaatatttccgtcaggaaaaagctgaaattgcggctattcgtcaggaagaaaagcgcgccgcagaagccaaagcgcgtttcgaagcgcgccaggctcgtctggagcgcgaaaaagcggctcgccttgaacgacataagagcgcagccgttcaacctgcagccaaagataaagatgcgattgctgccgctctggcgcgggtgaaagagaaacaggcccaggctacacagcctattgtgattaaagcgggcgaacgcccggataacagtgcaattattgcagcacgggaagcccgtaaagcgcaagccagagcgaaacaggcagaactgcagcaaactaacgacgcagcaaccgttgctgatccacgtaaaactgccgttgaagcagctatcgcccgcgccaaagcgcgcaagctggaacagcaacaggctaatgcggaaccagaacaacaggtcgatccgcgcaaagccgccgtcgaagccgctattgcccgtgccaaagcgcgcaagctggaacagcaacaggctaatgcggaaccagaagaacaggtcgatccgcgcaaagccgccgtcgaagccgctattgcccgtgccaaagcacgcaagctggaacagcaacaggctaatgccgagccagaacaacaggtcgatccgcgcaaagccgccgtcgaagccgctattgcccgagccaaagcgcgcaaacgggaacagcaaccggctaatgcggagccagaagaacaggttgatccgcgcaaagctgccgtcgaagcggctattgcacgcgccaaagcacgcaagctggaacagcaacaggctaatgcggtaccagaagaacaggttgatccgcgcaaagcggcagttgccgcggctattgcccgcgctcaggccaaaaaagccgcccagcagaaggttgtaaacgaggactaaatggtattcagaatagctagctccccttatacccataaccagcgccagacatcgcgcattatgctgttggtgttgctcgcagccgtgccaggaatcgcagcgcaactgtggttttttggttggggtactctcgttcagatcctgttggcatcggttagtgctctgttagccgaagctctcgtactcaaactacgcaagcagtcggtagccgcaacgttgaaagataactcagcattgctgacaggcttattgctggcggtaagtattccccccctcgcgccatggtggatggtcgtgctgggtacggtgtttgcggtgatcatcgctaaacagttgtatggcggtctgggacaaaacccgtttaatccggcaatgattggttatgtggtcttactgatctccttccccgtgcagatgaccagctggttaccgccacatgaaattgcggtcaacatccctggttttatcgacgccatccaggttatttttagcggtcataccgccagtggtggtgatatgaacacactacgcttaggtattgatggcattagtcaggcgacaccgctggatacatttaaaacctctgtccgtgccggtcattcggttgaacagattatgcaatatccgatctacagcggtattctggcgggcgctggttggcaatgggtaaatctcgcctggctggctggcggcgtatggttgctatggcagaaagcgattcgctggcatattcccctcagcttcttagtaacgctggcgttatgcgcaatgttgggctggttgttctcaccagaaacactggcagcaccgcaaattcatctgctgtctggagcgaccatgctcggcgcattctttattttgactgacccggttaccgcttctacgaccaatcgtggtcgtcttattttcggcgcgcttgcgggcttattagtctggttgatccgcagtttcggcggctatcctgacggcgtggcttttgccgtcctgctggcgaacatcacggttcctctgatcgattactacacgcgtccgcgcgtctacggccatcgcaaagggtaaaccatgctgaaaactatccgaaaacacggcattacgttggcgctatttgcagcgggttcaacagggttaactgcggccatcaaccagatgaccaaaacgacgattgctgaacaggccagtctgcaacaaaaggcgttatttgatcaggtgctgccagccgaacgctataacaatgcgctggcacagagttgctatctggtaactgcgccagagttaggtaaaggtgagcatcgggtttacatcgccaaacaggatgacaaaccggtagccgccgttctggaagcaaccgcgccagatggctattccggtgcgattcagctgctggtgggagccgattttaacggcacggtacttggcacgcgcgtgacagagcaccacgaaacgccagggcttggcgataaaatcgaactgcgcctttctgactggatcacccattttgcgggtaaaaaaatcagtggtgcagatgatgcgcactgggcggtgaagaaagatggtggtgatttcgaccagttcaccggcgcgacgattactccccgcgcggtggttaatgcggtaaaacgcgccggattgtacgctcagacgttaccggcacaactttctcaacttcctgcctgtggagaataaagcgtgagcgaaattaaagacgttattgttcaggggttgtggaaaaacaactctgcgctggtccagttgctcggcctttgtcctctgttggcggtcacgtccactgccactaacgctctgggtttaggacttgcgactacgctggtactgacgctgaccaacctgaccatttcgacgctgcgtcactggacgccagccgagatccgcattcccatttacgtgatgatcatcgcctcggtggtcagcgctgtacagatgctgatcaacgcctacgcctttggcctgtatcaatcattagggatttttattccgctgattgtcactaactgtatcgttgtgggccgcgctgaagccttcgccgccaaaaaaggtccggcgctttcggcactggacggcttttcaattggtatgggcgcaacctgcgccatgttcgtgctgggttcactacgcgaaattatcggcaatggcacattgtttgacggtgcagatgcgctgttaggtagctgggcaaaagtattacgcgtggagattttccacaccgactcccctttcctgctggcgatgctgccaccaggtgcatttattggcctgggactgatgctggcaggaaaatacctgattgatgaaagaatgaaaaagcgccgtgctgaagcagctgcagaacgtgcattgccaaacggtgaaacagggaatgtctgatgaataaagcaaaacgcctggagatcctcactcgcctgcgtgagaacaatcctcatcccaccaccgagcttaatttcagttcgccttttgaattgctgattgccgtactgctttccgctcaggcgaccgatgtcagtgttaataaggcgacggcgaaactctacccggtggcgaatacgcctgcagcgatgcttgaactgggcgttgaaggggtgaaaacctatatcaaaacgattgggctttataacagcaaagcagaaaatatcatcaaaacctgccgtatcttgctggagcagcataatggcgaggttccggaagatcgtgctgcgcttgaagccctgcccggcgtaggtcgtaaaacagccaacgtcgtattaaacactgcattcggctggccgactattgctgtcgacacgcacattttccgcgtttgtaatcgtactcaatttgcgccggggaaaaacgtcgaacaggtagaagaaaagctactgaaagtggttccagcagagtttaaagtcgactgccaccattggttgatcctgcacgggcgttatacctgcattgcccgcaagccccgctgtggctcttgtattattgaagatctttgtgaatacaaagagaaagttgacatctgaagaaaaggggtaacaccgattaccccattgataacctttctttatcctcttttaaaacatctttttaacgtcaatgatgccattgcttagcgttatcatcaggtaatccgtttgcggataaccaaaaatgcaggttaattgtttttttaatagcgaaattttctattcattcgtgatcaagatcacgatgctgtcgcaatgtaaaaacattgcaagaatcaggttaaaatcatttaaatttacacacgcaacaaatattgacctacaaaacattacactggctatttttcagaaactggactatctcactagtaaaaacgctaaatagcagaacatatcgccgttaagccatcacccccctctcagtgcagtgaaaaaatctgccgttacgttttttgaaaaatttaacgctggataacatttcccggaatggttgaattccccgcctcagttatatgtaacagattattacaaaggacttgtctgaaagtgcaagatagtgaacattacctgccgtttcccctcccactataacaattgcgcgtatgttttttatacataacgcgagaaagcacccccgttaatatgggatgtaaaaaaagaggtaaaagtgtccactgcaaaccaaaaaccaactgaaagcgtcagtttgaacgctttcaaacaaccgaaggcgttctatctcatcttctcgattgagttatgggaacgttttggttattacggcctacaaggaattatggctgtttacctggttaaacaactgggtatgtctgaagcggattcaatcacccttttctcttcctttagtgccctggtttatggtctggtcgctatcggcggctggttaggtgacaaggtactgggtactaaacgcgtaattatgctcggcgctattgtgctggcgattggttatgctctggttgcctggtctggtcacgacgccggtatcgtttatatgggtatggcggctattgcggtcggtaacggcctgtttaaagctaacccgtcttctctgctttctacatgctatgagaaaaacgacccgcgtctggacggtgcattcaccatgtactacatgtccgtcaacatcggctctttcttctctatgattgctacgccgtggctggccgcgaaatacggctggagtgttgcgtttgcgttgagcgttgtaggcctgctgatcactatcgttaacttcgccttctgccaacgctgggttaaacagtacggttcaaaaccagacttcgagcctatcaactaccgtaacctgctgctgaccattattggtgttgtggcactgatcgctatcgccacctggctgctgcacaatcaggaagttgcgcgtatggcgctgggcgttgttgccttcggtatcgtggttatcttcggtaaagaagccttcgcgatgaaaggtgctgcgcgtcgtaaaatgatcgttgccttcatcctgatgctcgaagccattatcttcttcgtgctgtacagccagatgccaacgtcactgaacttctttgcgattcgtaacgttgagcactccattctgggtctggccgtagaacctgagcagtatcaggcactgaacccgttctggatcatcatcggtagtccgattctggccgctatctataacaagatgggcgataccctgccgatgccaaccaagtttgcaatcggcatggtgatgtgttctggtgcgttcctgattctgccgctgggtgcgaaattcgcgtctgacgctggtatcgtgtctgtaagctggctggtcgcaagctatggcctgcagagcatcggggaactgatgatctctggtctgggtctggcaatggttgctcaactcgttccgcagcgtctgatgggcttcattatgggtagctggttcctgaccactgccggtgcaaacctgattggtggttatgttgcgggtatgatggctgtgccggataacgttaccgatccgctgatgtcactggaagtctatggtcgcgtattcttgcagattggtgtcgctactgccgttattgcagtactgatgctgctgaccgcgccgaaactgcaccgcatgacgcaggatgacgctgcagacaaagcggcgaaagcagccgtagcgtaaaattcagggaaactcttttacaagccgctaacttttcgttagcggctttttttttgttcagcaacgcactaccatactttaaaccacagacaaaaggagttaccgatgaaattgttctacaaaccgggtgcctgctctctcgcttcccatatcaccctgcgtgagagcggaaaggattttaccctcgtcagtgtggatttaatgaaaaaacgtctcgaaaacggtgacgattactttgccgttaaccctaaggggcaggtgcctgcattgctgctggatgacggtactttgctgacggaaggcgtagcgattatgcagtatcttgccgacagcgtccccgaccgccagttgctggcaccggtaaacagtatttcccgctataaaaccatcgaatggctgaattacatcgccaccgagctgcataaaggtttcacacctctgtttcgccctgatacaccggaagagtacaaaccgacagttcgcgcgcagctggagaagaagctgcaatatgtgaacgaggcactgaaggatgagcactggatctgcgggcaaagatttacaattgctgatgcctatctgtttacggttctgcgctgggcatacgcggtgaaactgaatctggaagggttagagcacattgcagcatttatgcaacgtatggctgaacgtccggaagtacaagacgcgctgtcagcggaaggcttaaagtaatagccatcggcccacaggtcgttgtgggccgaaatgagatatttcagagctttgttgcgctgaagtaatgttctggtttggcaatacgatcctgagcagccaccacttgcagctcatattcctgcattgctttggtggtcaccatgatttcgtagactgcagcggtcacatgttccagcgcctcctgcagcgttgccccctgaagcagtttcaccagcagtaaaccgctcgtcacatcaccaacacctaccggctggcgcataccaaaatccaccagcggacggctgatatgccaggcttcatcggcggtgaccagcagcatttcaaaacggtcacggctgtagccagctcgcgccaggtgtttaaccaacacaatttgtggcccttgcgcaatgagttcgcgcgctgccagaaccgcttcttcgacgttatttaccgcatgctcacagagtatttccagctcaaccagatttggcgcaatgatatcgctggcaggcaaaccgtgccgcacatgaaactctgcgacacccggtgcaacgatacagcctttttccggatgacccattaccggatcgcaaaaatatttcgcctgcggattcgcggctttcacctgacggacgataccgaggatatgttcaccctgctccgccgatcccagatagccacttaatacggcatcacaggtgtgtaatttatcaatggcggcaatgccttgcacaatttcggttaaatggctgggcggcatcacgcagccagtccatttgccgtattgggtgtgattagaaaattgaacggtgttcagcggccagacgttcgcgcccaggcggcgcatcggaaactctgccgcactgttacccgcatgaccataaacaacgtgagactggatagcgagaatatttttcatcatgttccctgtataaaaaccagggggagtgatttctcactccccctttccacttaatgcattatttccagcaaatcagacagtaattctttttaccgcgacgcagtaaggtaaaacgaccaaacagacgatcttcttctttaaagaagtattcaggatcggactgtttttcaccgttaatggtgatggcattggaggcgatagttttacgtgcctgaccacgggaaggttgcagttcagaatcgaccagtgcctgcatcaggtctgcgcccttttccatctcaaccatcggtacgccgtcctgcgccagctgttcgaagtccgcttcactcagcgcactcaaagaaccgctgaacaggcattcggtaatacgttttgccgcctgtaaaccttcttcaccgtgaaccagacgagtcacctgctccgccagtacatactgggcgcgcggtgctttaccgctgtttttatcttcttcttccagggcgttgatctcttcaatgctcataaaggtgaagaacttcaggaagcggtaaacgtcggcatccgcagtgttgatccagaactggtagaatttgtacgggctggttttcttcggatccaaccagactgcgccgccttcagttttaccaaatttggtgccatctgctttagtgatcagcggaacggtcaggccaaacacctgattctgatgcagacgacgggtcaggtcgataccagaagtgatgttaccccactggtcagaaccaccaatttgcagcaccacaccgtactgtttgttcagacaggcgaagtcataaccctgcaacaggttgtaggaaaactcagtgaacgaaatcccctgatcttcacggttgagacgctgcttaaccgcttctttgttgatcatctggttaacggagaagtgtttgccaatatcgcgcaggaaggtcagcacattcatattgccgaaccagtcatagttgttcgccgcgatagcagagttttctccacagtcgaaatcgaggaacggggcaacctgcttacggattttgtccacccactcctgaacagtttcttcggtgttcagcttacgctcggcagctttgaagctcgggtcgccaatcagacccgtcgcgccgcctaccagcgcaaccggcttgtggcccgcctgctggaagcgtttcaggcataacaatggaacaagatgccccaaatgcaagctgtcagcggtaggatcgaagccgcaatagagcgcgatcgggccttgcgccagtcgctctgctaacgcttcctcgtccgtcacctgggctaccagcccccgctcttgcaattgtttaatcaagttactgcttgccatcaaaatctccatgtatataacgactgcacctttgccggtacacgacttttcgccagatgcgaaagagacatagaataaagtgccagaatcaggagtaccagcgattaaagcaagatttttgcatcttttcagggtgcaagacgatcaatcttccacgcatcattttcacgctggtacaaaaagcggtcatgcaggcgatgctcaccaccctgccagaactcaatctgttcaaggctgacgcgaaaaccgccccaaaagctcggcaatggcacttcgccctgttgaaacttctgcttcagctccaggaatttactttcaaggataccgcgggcagaaatgcgactggactgcttcgaaacccatgcaccaatctggctatcacgcgggcggctatgaaaatatttcatcacttcgagagtcgaaagtcgttctgctttaccgatcaccatcacctggcgctcaagggtatgccacgggaacagcaggctaacgcgcggattattttcgatttgatgtgctttacggctgccgaggttggtgtaaaacaccatgcctttttcgtcgtaatgtttgagtaaaacgatgcgctgataaggctgaccatgttcatccacggtagcgaccaccatcgcggtagggtccgccagtttggcttcacaagcctgagagagccaacgttcaaaaagggttaatggatcggcgggaagatcgcggcggcgtaacccgcctttggtgtattcacggcgcagatgcgcgatttgctgcaattcgtcgttatcagacatggttttctttacggattgtcagtgggtgacgctattgtgcgccgcccctggaaaaatctcaacgctgtggattttgtaactgacagttattcaagacgatgcggtcgcgtttatagacagtcgcttcatcgcctttcgaccagaaaacatagattccgtcagtgtaacgcgcgccagaggctgaaatgccctgtttgagatgcagtagttgattatcgtaaacaaaactgacctcctggcgcggattattcagtttgaccgtcaacggtttttcatcacactggtattccagcgtatcggtttgcatgcgctcaaccagctgattaaaggcgctacagccggagagaaggaccggcaaaatgataattaacagttttttcatagtcatatcccgaagactttcctggtctggagggcaatacgccctccctaacgttccaagtgtaacggcagacgcggtaagaaaaattcagttaactctgatatcacgggttagcggggaaaatagcccccagtaccgtctcctggcttgcgccagtgacggaaggcagatttcctggtaatcccgccagcgtccgccaggcaagccaggcgaaagccaatgcttccatgtcatcgccactaatgccaacggcatcggtggtggtgacttctgtgcctggcagtaatgccgccagacgcgccatgagtagcggattacgactacctccaccacataccatcaatcgttcgcagccaccgctcaacaaaacttgttcagaaatggtcacggcggtgagttctgccagtgtcgcctgcacatctcggggatcaacacccggaaaatggcgcaaatggcgctccagccaaccatagttaaagtattcgcgtccggtgcttttcggtgcaggttgcgagaaatacgggtcgctgagcatattttgcagcagtgggagaataactttacccgcccgtgcccactcggcatctttatcgtaaggtttaccggcctgacgccagatccaggcatccatcagcatgttaccaggaccggtatcgtagcccccaaccggctgcccaggaatgagcagtgacagattggcgatgccgccaatattgagcaccattcgtcgctcggttgggtgagccagcagcgcatgatggaacgcaggtaccagcggtgcgccttgtcctcccaaggcaatatcgcgacggcgaaaatcaccgacaaccgtaattccggtgcgtgccacaatttgattgttatcgccaatctgtaaagtgtgtggtgccacgcccgtcggttcatgccagacggtttgaccgtgacaaccgatcgcaactatatctcttgcctgcagattttgttccttaagcaaggcattgaccgcatcagcaaaaagttgcccgagttgagtatcaagctgtccaaactgcgaaagtgtaagctgctggccctggcaaatatccagtacagcctgtttcagagataccgggatcggccaactcaaacttgccagctgtgcgacccggtgttcatcaattgtcgccaacacaacatcaacaccatcaaggctggtgcctgacataacgccaataaagcggcccgatttcatagttcatcctttttcaatctgacgtttgcgcaccactcaaacataaacttttcgtgaataccatgcggaatgaccgatttttaccgttggtagtaaaacattatcttcaaatcaataatcatcatgaatgttttgtttataattggttgatcctactttcattatgatttgctcatatttggtagaacatgtaaccatggattcacatatgccatatactttgaccatgagggatgcttgcgtggcgtttcatggtgaacaggagatttttcaatgattaaacgcgtattggttgtttcaatggtaggtctgtctcttgtcggttgtgttaataacgacaccctgtcaggggatgtttataccgcttctgaagcgaaacaagtacagaatgtcagctatggcaccatcgttaacgtacgtccggtacagattcagggcggtgatgattccaacgttatcggtgcaattggcggtgctgttcttggtggtttcctggggaatactgttggtggcggaaccgggcgttctctggctactgcagcaggcgctgttgcaggtggcgtagctggtcagggcgtacagagtgcaatgaacaaaacgcagggtgtcgagctggaaattcgtaaagacgatggtaataccatcatggtggtacagaaacaaggcaacactcgtttctctccgggccaacgtgtcgtactggccagcaatggcagtcaggtgaccgtttctccgcgctaaataagtttgcgtgtggtcaggttactgaccacacgcccccttcatttcaccctttggcctgtaactcaatgatattatgctcaagttttgcgatgagcgtaatcagttgctccagttcctctgcggagatgccatgtaatatttccgcgcgggttttgttaataacagcttccatttcgctgatcagcggctctgccttttccgtcagtttaatacgtttagcccgacgatcgctggcacaagtttgacgcgaaattaaccctttttcttccagttggtccagagtacggaccagtgatggctgctcgatgccaatcgcttttgccagttgaatttgcgactggtctggaggtaactgatggatattgtgtaacgtaacccaatgggtttgtgttaactccagcggtttcaggcgatggtctatcagagcacgccatatgcgcaccaaccgtgccagatcagaacctagtggcgattccaatttcatctccttataattagcttgctaagatattatgcggcttttagaatagtgtgcagcaattgtattgctaaaacaaatgtattgctgcatttggttaccgtcagacatatttttcagaaattgcgcgtaaatttttcgcacttaaagaatatttattaatctaacgcaatatattcggtcgtaaaggaatctactttgtgaagtttatgctcaatgcaacaggattgcccttacaagatctggtgttcggtgcgtccgtctactttcctccgtttttcaaagcattcgcgtttggattcgtcatctggcttgtcgtacaccgcctgcttcgtggctggatctacgccggtgacatctggcatcccttgttaatggatttatcgctgtttgcgatttgcgtttgccttgctctggcaatactgattgcgtggtaactatgtcaattaaaacaattaagtatttctcaacaatcattgtagcggtagttgcggttcttgccggatggtggctgtggaattattacatgcaatctccgtggacacgcgacgggaaaatacgcgcagaacaggtttctatcaccccacaggtgtcgggacgtattgttgagctgaatataaaagacaaccagctggttaacgcgggggatcttctgctcacgatcgataaaacgccctttcagatcgccgagctgaacgcacaggctcagctggcgaaagcgcaatctgacctcgcaaaagccaataacgaagcgaatcgtcgtcgtcatctctcacaaaattttatttctgccgaagaactcgataccgctaacctcaatgttaaagcgatgcaggccagtgttgatgccgcacaggcgacgctgaaacaggcacaatggcaactggcgcaaacggaaattcgcgccccggtgagtggatgggtgactaaccttactacccgcatcggcgattacgctgataccgggaaaccgctgtttgcccttgtcgacagccactcgttttacgtcattggttattttgaagaaaccaagttgcgccatatccgcgaaggtgcaccagcacaaattaccctctatagtgataacaaaacgttacagggtcacgtttccagtatcggtcgggcgatttatgatcagagcgttgaaagtgactcaagccttattccggatgttaaacctaacgtcccctgggttcgactcgcccaacgcgttcccgtccgctttgcgctggataaagtcccaggcgatgtcacgttggtgtcgggcaccacctgtagcattgccgtaggtcaataatgaacgcatcgtcatggtccttgcgcaatttgccctggttcagggccacgctggcgcaatggcgttatgcgttacgcaataccattgccatgtgtctggcgctgacggttgcctattatttaaatctggatgaaccctattgggcgatgacctcggctgcagtggttagctttcccaccgttggcggtgttatcagcaaaagcctcggacgcatcgctggcagtttgctcggagccattgcggcactgcttcttgccgggcatacgctcaatgagccgtggttttttctattgagcatgtcggcgtggcttggcttttgtacctgggcctgtgcgcacttcacgaataacgtcgcgtatgcatttcaactggcgggctacacggctgccatcatcgcctttccgatggttaatattactgaggccagccagctgtgggatatcgctcaggcgcgcgtttgcgaggtaatagtcggtattttgtgcggcggcatgatgatgatgatcctgccgagcagttccgatgctactgcccttttaaccgcattgaaaaacatgcacgcccgattactggaacatgccagtttactctggcagcctgaaacaaccgatgccattcgtgcagcacatgaaggggtgattgggcagatactgaccatgaatttgctgcgtatccaggctttctggagccactatcgttttcgccagcaaaacgcgcgccttaatgcgctgctccaccagcaattacgtatgaccagtgtcatctccagcctgcgacgtatgttgctcaactggccctcaccgccaggtgccacacgagaaattctcgaacagttgctgacggcgctcgccagttcgcaaacagatgtttacaccgtcgcacgtattatcgccccgctacgcccgaccaacgtcgccgactatcggcacgtcgccttctggcagcgactacgttatttttgccgcctttatctgcaaagtagtcaggaattacatcgtctgcaaagcggtgtagatgatcataccagactcccacggacatccggcctggctcgtcataccgataacgccgaagctatgtggagcgggctgcgtacattttgtacgttgatgatgattggcgcatggagtattgcttcgcaatgggatgccggtgccaatgcattaacgctggcagcaattagctgcgtactctactccgccgtcgcagcaccgtttaagtcgttgtcacttctgatgcgcacgctggtgttactttcgctattcagctttgtggtcaaatttggtctgatggtccagattagcgatctgtggcaatttttactgtttctctttccactgctggcgacaatgcagcttcttaaattgcagatgccaaaatttgccgcattgtgggggcaactgattgtttttatgggttcttttatcgctgtcactaatcccccggtgtatgattttgctgattttcttaacgataatctggcaaaaatcgttggcgtcgcgttggcgtggttagcgttcgccattctgcgtccaggatcggatgctcgtaaaagccgccgccatattcgcgcgctgcgccgggattttgtcgatcagctaagccgccatccaacactgagtgaaagcgaatttgaatcgctcacttatcatcacgtcagtcagttgagtaacagccaggatgcgctggctcgccgttggttattacgctggggtgtagtgctgctgaactgttctcatgttgtctggcaattgcgcgactgggaatcgcgttccgatccgttatcgcgagtacgggataactgtatttcactgttgcggggagtgatgagtgagcgtggcgttcagcaaaaatcactggcggccacacttgaagaattacagcggatttgcgacagccttgcccgtcatcatcaacctgccgcccgtgagctggcggcaattgtctggcggctgtactgctcgctttcgcaacttgagcaagcaccaccgcaaggtacgctggcctcttaattacttaattacaccacaggcatagcgttcaccgccaccgcccagcggtttaggttgatcggacatattatcgccgccaacgtggaccatcagcgctttgtctttgatttcatccagtgatttcagacgaggcgcgatgacggcatcggtagctttgccgtcattattgacgaccagtgcaggcagatcgcctaaatgcccggcaccttctggcccttcatgtttaccggtattttgtggatcaagatgcccgcctgcggattccgcggcgctggctttgccatctttggtggctggctggcagcttcctttggcatgaatatggaagccatgttcaccggggggtaatgctttcagatcgggcgaaaactccagacctttatcggtttcagtaatggtgacgctaccaattgactgccctaccccttgcgacgtgacgaggttcatctcgactttttcactggcagcttgtgcgccggttgcaacaaccagcgccagaatagccagactaaaacgtttcataggacctccgttcattgtgcattcctgaataagtgtaaaccagtgacacatttttgaacggcggctattcctaaaagtgcttacggtacgtcgtaccccagtgccgctttacggatacgaaaccattgttgacgggtcattttcagtgtttctgcttcgacagctgcccgtacgcgctcaattttacctgaaccgataattggcagcggctgcgatggtaaacgtaatacccaggcgtaaaccacctgttcaatcgagcccgcgtttaactcctctgccaccacagccagttcatcacgcagcggctggaaataatcatcattaaacagacgaccaccaccaaggcaggaccacgccatcggacgaacacgcagttgttgtagttggtcgagcgtgccatccagcagtaacggctgatgcaccggggatatttccacctgattagtggcaagggtaaacggcagacgtgattgcaacagggcaaattgcgcaggcgtaaagttcgatacgccaaaatgacgcactttgccgctctgatgcagatgtttgaacgcgtccgccacttcatcggcatccattaacgggtctggtcggtggattaacagcaaatccagatgatcggtcgcgagattaattagcgactgttcggcgctcttaatgatgtgatcgcggtcagtgatgtaatgaccaatgacgttttcttcacgcgcggtcgtcgcgataccgcatttactgacgatttccatccgttcacgcaggtgaggtgccagtttcagtgcctcgccaaacgccgcttcgcactgatagccaccataaatatcagcatggtccacggtggtcacgccgagatccagatgctcttcaataaaactgaccagctggcgggcggacatattccagtccatcaatcgccagtagcccatcacaaaacgggaaaactccgggccttgcggcgcaatagtaatacgctgaaccataatcgcttcctcttatcagatatgagaggagtatacgcaagattaggttcaaaagagtgatggttgctccggttcgtctgatgacgctggcttatttgcgcgtaatttgcgcattaatcgctgccgacaaaggcgcagcacctcttgtttttcgccatcgctcattttattccagttaaaacgctcatcacgactacgaaaacagccgcgacaaaacccgcgttcgtcagactggcaaattccccggcacgggctctggacgggaaagaactctaattgctccgccacttcgccctcctcagataagattattaccattattgaagctgttaatgtccaaagtagcaactttgcttgcactagaccgactggtctactacactccaacgcatgaacaaacacaccgaacatgatactcgcgaacatctcctggcgacgggcgagcaactttgcctgcaacgtggattcaccgggatggggctaagcgaattactaaaaaccgctgaagtgccgaaagggtccttctatcactactttcgctctaaagaagcgtttggcgttgccatgcttgagcgtcattacgccgcatatcaccagcgactgactgagttgctgcaatccggcgaaggtaactaccgcgaccgcatactggcttattaccagcaaacactgaaccagttttgccaacatggaaccatcagtggttgcctgacagtaaaactctctgccgaagtgtgcgatctgtcagaagatatgcgcagcgcgatggataaaggtgctcgcggcgtgatcgccctgctctctcaggcgctggaaaatggccgtgagaaccattgtttaaccttttgtggcgaaccgctgcaacaggcacaagtgctttacgcactgtggcttggcgcgaatctgcaggacaaaatttcgcgcagtttcgagccactggaaaacgcgctggcccatgtaaaaaacattattgcgacgcctgccgtttagcaggcattttttatcaccagacgaccgggagcctttatgtcatctgaaaaactgtattccccactgaaagtgggcgcgatcacggcggcaaaccgtatttttatggcaccgctgacgcgtctgcgcagtattgaaccgggtgacattcctaccccgttgatggcggaatactatcgccaacgtgccagtgccggtttgattattagtgaagccacgcaaatttctgcccaggcaaaaggatatgcaggtgcgcctggcatccatagtccggagcaaattgccgcatggaaaaaaatcaccgctggcgttcatgctgaaaatggtcatatggccgtgcagctgtggcacaccggacgcatttctcacgccagcctgcaacctggcggtcaggcaccggtagcgccttcagcacttagcgcgggaacacgtacttctctgcgcgatgaaaatggtcaggcgatccgtgttgaaacatccatgccgcgtgcgcttgaactggaagagattccaggtatcgtcaatgatttccgtcaggccattgctaacgcgcgtgaagccggttttgatctggtagagctccactctgctcacggttatttgctgcatcagttcctttctccttcttcaaaccatcgtaccgatcagtacggcggcagcgtggaaaatcgcgcacgtttggtactggaagtggtcgatgccgggattgaagaatggggtgccgatcgcattggcattcgcgtttcaccaatcggtactttccagaacacagataacggcccgaatgaagaagccgatgcactgtatctgattgaacaactgggtaaacgcggcattgcttatctgcatatgtcagaaccagattgggcggggggtgaaccgtatactgatgcgttccgcgaaaaagtacgcgcccgtttccacggtccgattatcggcgcaggtgcatacacagtagaaaaagctgaaacgctgatcggcaaagggttaattgatgcggtggcatttggtcgtgactggattgcgaacccggatctggtcgcccgcttgcagcgcaaagctgagcttaacccacagcgtgccgaaagtttctacggtggcggcgcggaaggctataccgattacccgacgttgtaatccaacattgcgagcggcgtaaagccgccgctatactaaaacaacattttgaatctgttagccattttgaggataaaaagatgcgtcttcttcataccatgctgcgcgttggcgatttgcaacgctccatcgatttttataccaaagtgctgggcatgaaactgctgcgtaccagcgaaaacccggaatacaaatactcactggcgtttgttggctacggcccggaaaccgaagaagcggtgattgaactgacctacaactggggcgtggataaatacgaactcggcactgcttatggtcacatcgcgcttagcgtagataacgccgctgaagcgtgcgaaaaaatccgtcaaaacgggggtaacgtgacccgtgaagcgggtccggtaaaaggcggtactacggttatcgcgtttgtggaagatccggacggttacaaaattgagttaatcgaagagaaagacgccggtcgcggtctgggcaactaatctcctgccgggcgtgaactcatcgcgcccgcatctttactgcatcgacaagtaatatttgtcataatgcgcgctgcaatttatccgtattaagagaatcagatgtccgataacgctcaacttaccggtctgtgcgaccgttttcgtggtttttatcctgttgtgatcgatgttgaaacagccggatttaacgccaaaaccgatgcgctgcttgagattgccgccatcaccctgaaaatggatgaacaaggctggctgatgccggacaccacattacatttccacgtcgaaccatttgtcggcgcaaatttgcaaccagaagccctcgccttcaacggcattgacccgaacgatcccgatcgcggcgcggtcagcgaatacgaggcgctgcacgaaatttttaaagttgtacgtaaaggtattaaagcgagcggctgtaaccgcgccattatggtggcgcacaatgccaattttgatcacagctttatgatggccgccgcagaacgcgcctcactgaaacgtaacccgttccaccctttcgccacttttgacactgctgcactggccgggctggcactcggacaaaccgtattgtcaaaggcttgccagaccgctggcatggacttcgacagcacccaggcgcactccgcgctgtacgacaccgaacgcactgctgtgctgttttgtgaaatcgtcaaccgctggaaacgtctgggaggctggccgctatctgccgccgaagaggtgtaatcgagtcgatgcctgatgacatgcaatgattcaggcatctatagtgaggctattccacgcatcctgcatgatattcacggggaatagcgttaatggcagataatccagacccttcatcgctcctgccggacgtgttttcaccggcgacccgcgactggtttcttcgcgcctttaaacagccgaccgctgtccagccgcaaacctggcatgtggcggcgcgaagcgaacatgcgctggtgattgcaccgaccggctccgggaaaacgctggcagcatttctctacgccctcgatcggctcttccgcgaaggcggcgaagatacccgcgaggcgcataagcgtaaaacctcacgcatcctctatatttcaccgataaaagccctgggcaccgacgttcagcgcaacttgcagatcccgttgaagggtattgccgatgaacggcggcggcgcggcgaaacggaagtcaatcttcgcgtagggatccgtactggcgatacgcctgcacaggaacgcagcaaactcacccgtaatccgccggatattctgatcaccacacccgaatcactctatctgatgctgacctcccgcgcgcgcgaaacgctacgcggcgtcgaaacggtaattattgatgaagtccacgcggtagcgggcagtaaacgtggtgcgcatctggcgttaagtctggagcggctcgatgcgctgctccacacctcagcacagcgaattggcctttctgccactgtgcgctcagccagcgatgtggcagcatttcttggtggcgatcgcccggttacggtagtcaacccgcccgcaatgcgccatccgcagatacgaattgtcgtaccggtcgccaatatggatgatgtctcatcggtcgccagcggcaccggcgaagacagccatgccggccgggaaggctccatctggccatatattgaaacgggtatccttgatgaagtgttgcgccatcgctcgaccattgtctttactaattcgcgggggctggcggaaaaactgacggcacgattaaatgagctttacgccgcacgcttacagcgttccccgtctatcgccgttgatgcggcccatttcgagtcgacctccggcgcaacctctaaccgtgtacaaagtagcgacgtttttattgcccgctcacaccacggctccgtctctaaagaacaacgagcaatcaccgaacaggcgctgaaatcgggtgaattacgctgcgtggtcgcaacctccagtcttgaactggggattgatatgggcgcggtggatctggtgattcaggtggcaacgccgctttctgttgccagtgggttacaacgcattggtcgcgccggacatcaggttggcggtgtatctaaagggctgtttttcccccgtacccggcgtgatttagtcgattccgcagtcattgtagagtgtatgttcgcaggcaggctggaaaacctgacaccaccgcataatcctctcgacgtccttgcgcagcaaaccgttgccgccgcggcgatggatgcattacaggtagacgaatggtactcccgcgtacgccgtgccgcaccgtggaaagatctgccaagacgtgtttttgacgccacgctggatatgctttccgggcgctatccctctggcgatttttctgcttttcgccccaaactggtctggaacagggagaccgggatattgaccgcccgacctggcgctcaattgttggcggttaccagcggcggcaccattccggatcgtggcatgtatagcgtgttattacccgaaggtgaagaaaaggccggttcgcggcgggtgggtgaactggatgaggagatggtatatgagtcgcgggtgaacgacattatcactctcggcgctacctcatggcggatccagcaaatcacccgcgatcaggtgattgtgactcctgctccgggtcgttctgcccggctccccttctggcgtggtgaaggtaacggacgtccggctgaattaggcgagatgatcggcgattttcttcatttgctggcggatggcgcgttcttttccgggactattcccccgtggctggcagaagaaaatacgatcgccaatattcaggggttgattgaggagcagcgcaacgcgacgggcatcgttccggggagtcgccatctggtcctcgaacggtgccgtgatgaaattggtgactggcgtattattttgcactctccctatggaagacgggtgcatgaaccctgggcggtggcgattgccgggcgaatacatgcgctatggggcgctgacgcgtcggtggtcgccagtgatgacggcattgttgcacgtattcctgacaccgatggtaaattgcccgatgccgcgatttttttgtttgaaccagaaaagttgctgcaaattgtccgcgaggcggtaggcagctcggcacttttcgccgcccgttttcgcgaatgcgccgcgcgggcattattaatgccggggcgcactccgggccatcgcaccccgctttggcaacaacggctgcgcgccagtcagttgctggaaatcgctcagggatatccggattttccggtcattctcgaaaccctacgcgaatgtctgcaagatgtttatgatcttcccgcactggaacgtttgatgcgtcgcctgaacggtggcgaaattcaaatatccgatgtaacgaccactacgccctcgcctttcgccacaagtttattgttcggctatgtcgcggaatttatgtaccagagcgacgccccgctggcagagcgccgggcatccgtactgtcgctggacagcgagttactgcgcaatctactcggacaggtcgatccgggggaattactcgacccgcaggtcattcgccaggtggaagaagagttgcaacgactggctcctggcagaagagcgaaaggtgaagaaggattgttcgacctgctgcgcgaactggggccaatgaccgttgaagacctggcgcaacggcatacaggcagcagtgaagaggttgcgtcgtatctggaaaatcttcttgcagtaaaacgaatcttcccagcgatgattagcggacaggagcgtcttgcctgtatggatgatgccgccaggctgcgtgatgccctcggcgtacgactaccagagtcattgccagagatttatttacatagagtcagttacccgcttcgcgacctctttctgcgctatctccgggctcatgctctggtcacggctgaacaactggctcatgagtttagtctcggtattgccattgtcgaagagcagcttcagcaactgcgtgaacagggtctggtgatgaatctgcaacaagacatctgggtgagcgatgaagtatttcgtcgtctgcgtttgcgctcgctgcaagccgccagagaagcgacgcgtcccgttgcagccacgacctatgcgcgattgctgctggaacgtcagggcgtattacccgccaccgatggtagcccggcgctctttgcctcaacatcgccaggcgtttatgagggcgtagatggcgtgatgcgggtgatcgaacagcttgccggagtcggtttacccgcctcactctgggaaagccagatcctgcctgcccgcgtacgcgactattcgtcagaaatgctcgatgaattactggcaaccggtgcggttatctggtcggggcaaaaaaaactgggtgaagatgacggcctggtggcactgcatctacaggaatatgctgcagaatcgttcactcccgccgaagcggatcaggcgaatcgttcggcgctgcaacaagcgatagtcgctgttctggctgacggaggagcctggtttgcacaacaaatcagccaacggatacgcgacaaaatcggcgaatcggttgatctctctgccctgcaagaggcgttatgggcgctggtctggcaaggcgtcatcaccagcgacatttgggcaccgttacgcgccctcacccgcagcagttccaacgcacgcacctcaactcgccgcagtcaccgggctcgtcgtggacgtcctgtctatgcgcaacccgtctcgccgcgggtatcttacaacacaccaaatctggctggacgctggtcgttattgcaggtggagccactaaacgataccgaaaggatgctggcgctggcggaaaatatgctcgaccgctacggcatcatcagtcgtcaggcggtgatagccgaaaatatccctggcgggtttccatcgatgcaaacgctttgtcgaagtatggaagactccgggcgaattatgcgaggtcgttttgtagaaggtctgggtggcgcgcaattcgctgaacgtctgactattgaccgattgcgcgatctggcgacacaagccacgcaaacgcgccactatacaccagtggcgctctctgccaacgatccggctaatgtgtggggaaatcttctgccctggcctgcacatccggcaacgctggttccaacgcgtcgggcgggtgcgctggtggtcgtttctggcggcaaattgttactctatctggcgcaaggtggcaaaaaaatgctggtctggcaggaaaaagaggaattactcgccccagaggttttccacgcgctgactaccgcactgcgtcgcgaaccacggctgcgctttacgctaacagaagtgaatgatctaccggtccggcaaacgccgatgtttacgctgctgcgtgaggcgggattttcaagttcgccacaagggctggattggggatagagaaaggactgacggatgcccgttcgcatccgtcagtattgcaggacggattattccgcgtccggctcttcagacttgtatttagcggcagtttctttgatcagctgctgcagttcgccacgctgatacatttcgatcacgatatcacaaccgccgaccagctcgccgtcaacccacagttgcgggaaggtcggccagttagcatatttcggcagttccgcacgaatgtccggattctgcagaatatcaacataggcaaaacgttcgccacatgcggcaagcgcctggactgcctgggcagagaaaccgcagctcggcagtttcggtgaacctttcatgtacagcaggatcgggttttcagcaatctggcgttggattttttcgatagtggtgctcattgtcttgcttcctcaaacttctttacggcagtaatctgacattgtagcgggtcagtgcggcatcggaaaataacattttcatcacgcttttgctattttatccctttgctctatttgttgcatttcaaatattcgtttcttctctgatgccggcaaactggcgtatttataaccatttttagctttcactgctgcatttttttgcgctcgccaacgaaacgtattttttaacaataaaagctattaactttctcttcttctatgcattagaatcatcaagttttgtaaatcagacgcaggcatgatagacctgcctttacagagggacgctcagtggcgcggataaaccgtatttcgatcacgctctgtgctttactttttaccaccctgcctttaacgcctatggcccatgcttcaaagcaagccagggagagttctgctaccactcatatcaccaaaaaagcagataaaaagaaaagcacggcaaccaccaaaaagacccagaaaacagcgaaaaaagccgccagtaaaagtacgaccaaaagcaaaaccgcttcttccgttaaaaaatcttccattaccgcttctaaaaacgccaaaactcgcagcaaacacgccgtcaataaaacggcctcagccagctttaccgaaaagtgtaccaaacgtaagggctataaatcgcattgtgtgaaagtcaaaaatgccgcgtcaggaactcttgccgacgcgcacaaagcgaaggtgcaaaaagctacgaaagtggcaatgaataaactgatgcagcaaattggtaagccatatcgttggggtggcagctcaccgcgtaccggttttgattgcagcggcctggtttattacgcttataaagatttggtgaaaattcgtattccgcgtacggcgaatgaaatgtatcacctgcgtgatgcagcgccaatcgaacgtagtgaactgaaaaacggcgacctggtctttttccgtactcagggacgcggcacagccgatcatgtcggcgtgtatgtcggcaacggcaaatttattcagtcaccgcgcacaggtcaggaaattcaaatcacttctctcagtgaagactactggcagcgccactatgttggcgctcgtcgggtaatgaccccaaaaacacttcgctaaaactttaccctgttgttacggcaacagggtaagttcatcttttgtctcaccttttaatttgctaccctatccatacgcacaataaggctattgtacgtatgcaaattaataataaaggagagtagcaatgtcattcgaattacctgcactaccatatgctaaagatgctctggcaccgcacatttctgcggaaaccatcgagtatcactacggcaagcaccatcagacttatgtcactaacctgaacaacctgattaaaggtaccgcgtttgaaggtaaatcactggaagagattattcgcagctctgaaggtggcgtattcaacaacgcagctcaggtctggaaccatactttctactggaactgcctggcaccgaacgccggtggcgaaccgactggaaaagtcgctgaagctatcgccgcatcttttggcagctttgccgatttcaaagcgcagtttactgatgcagcgatcaaaaactttggttctggctggacctggctggtgaaaaacagcgatggcaaactggctatcgtttcaacctctaacgcgggtactccgctgaccaccgatgcgactccgctgctgaccgttgatgtctgggaacacgcttattacatcgactatcgcaatgcacgtcctggctatctggagcacttctgggcgctggtgaactgggaattcgtagcgaaaaatctcgctgcataataactgatggcaaatgcagcattgcctgaagcgctacgcttatcaggcctacgcggatcatcgatgtaggtcggataaggcactcgccgcatccggcaagataaatcgcacgttgtcagcaactgtaacgcagaaggttatccttctgcgtttttgtttaattagctgttagcaacgcaaactgtttcaggttgttttctggctgacataaacaccagcaataatgccagtcccgcgacaatcgctcccatcaccggcacaaagctgtatcccagcccagcggaaattaccgcaccaccagcagctgctcccagcgcatttccaagattaaaggcaccaatattgactgatgaagacagacctggcgcttcactggcgacacgcatcacgcgcatctgtaacggcggtacgaccgcaaaggttgctgcgccccacaccaccatgctaatagctgcgccgaactcattgcgggccaggaacgggattgccagcataatcaccatcaacaacaacaaaaagcctttcaacgtgccgttaactgaacgatctgccagtttgccgccgagatagttaccgatagagaatccgacaccaatcagcaccagcattgccgtgacgaacaccggtgttgcgtgggtaatactttgcagtaccggagagatataggtgtagagagtaaacattgcaccagctcccagtaccgtcgtcagcaatgcagacagcacctgcggacgcattaataccgccagctcttttttcacttcaggtcgtgcccctgcaccacctttaggtaatgagaagaacagacttaccattgaaatcactcccagccccgccgttgccagaaatgacatccgccagccgatggtttcacccaaccaggtcgccgccggcacgccaccgatatttgccagggttaaccccataaacatagtggcaactgcgctggcctgtttatgttttggcaccacgcttgcggccacgactgaacccaaaccaaaaaatgctccgtgattcaggctggtcaaaatgcgtgaaagcatcagggtcatataatccggcgcgatggcggaaagtacgttgccgagcgtgaaaattgccatcaggaaaatcaacgcactgcggcgggcacgatgagaaagtagaagcgtcatcagcggcgcgccaaccattacgccaactgcataggcactgattaacattccggcagcgggaatcgagacatccacaccgcgcgcaatgacgggcaacaagcccattggcgagaactccgttgtcccgataccaaacgcgccaatcgccagcgccagcaacggatagttaattttcatgccttatctccacctcttcgcgtcattacgcgatattcattaaagtggcgaaagcatgacagcaatcacaaaaaaatgaaaataacaaaaagagaaaacacttttgccattttgctaacaaacaggaaggagatgcgagggagaacgcgctccctcgagaggaaatcagtgcagcgcggcagtcaaacccacggctacgatcaaaccgaggacgataatcgttgttaccagtgaaaatttaaggtcggtgctcatcaagttttctccttttttattaccacacaaaaagtgatattacgcatttttacacactgtgatgaaaaaatctcccgtcatttataatgataagtgtttttaccacttccccttttcgtcaagatcggccaaaattccacgcttacactatttgcgtactggccattgaccccttcctgacgctccgtgtcgtttttccggcgtaccgcaacacttttgttgtgcgtaaggtgtgtaaaggcaaacgtttaccttgcgattttgcaggagctgaagttagggtctggagtgaaatggaatggcaacaataaaagatgtagcgaaacgagcaaacgtttccactacaactgtgtcacacgtgatcaacaaaacacgtttcgtcgctgaagaaacgcgcaacgccgtgtgggcagcgattaaagaattacactactcccctagcgcggtggcgcgtagcctgaaggttaaccacaccaagtctatcggtttgctggcgaccagcagcgaagcggcctattttgccgagatcattgaagcagttgaaaaaaattgcttccagaaaggttacaccctgattctgggcaatgcgtggaacaatcttgagaaacagcgggcttatctgtcgatgatggcgcaaaaacgcgtcgatggtctgctggtgatgtgttctgagtacccagagccgttgctggcgatgctggaagagtatcgccatatcccaatggtggtcatggactggggtgaagcaaaagctgacttcaccgatgcggtcattgataacgcgttcgaaggcggctacatggccgggcgttatctgattgaacgcggtcaccgcgaaatcggcgtcatccccggcccgctggaacgtaacaccggcgcaggccgccttgccggttttatgaaggcgatggaagaagcgatgatcaaggtgccggaaagctggattgtgcagggtgactttgaacctgaatccggttatcgcgccatgcagcaaatcctgtcgcagccgcatcgccctactgccgtcttctgtggtggcgatatcatggcaatgggcgcactttgtgctgctgatgaaatgggcctgcgcgtcccgcaggatgtttcgctgatcggttatgataacgtgcgcaacgcgcgctattttacgccggcgctgaccacgatccatcagccaaaagattcgctgggtgaaacagcgttcaacatgctgttggatcgtatcgtcaacaaacgtgaagaaccgcagtctattgaagtgcatccgcgcttgattgaacgccgctccgtggctgacggcccgttccgcgactatcgtcgttaatcacccgttgcgggagtctcttccggctcccgcagccactccttattcagcgtctcactatcgccgagatactcaagcaaccaggttaacgcaggcgacatatcattttgctgccatgtcagacaacatgccgaatccggaaaggggttttccagttctaatgctacccacttcccctcattaagccacggtttggcgaaatgtgttggcaccatccctatgcataatcctgccgagatacaggttgccgatgattcccagtcaggcacgacaactcttttttggttatccagcaaccaggtaatacgtttaggtagcgttcgcgaggtgtcttcgcgcaccaacgacggccagttgcgcaacgtatcatcgctgaacgggccatccatcaacgccagcgggtggtgactggcaacaacgcaactccagcttagcatccccatatcccggaaggcataacgaccgcctaccggaatcgcgcgtgttgcgccaatcgccagttccacgcgcccgtcggaaagcgcatcccagacaccgttgaacacttcctgaaagacaagaagttcgacatcatcaaaatggcgataaaaatcaacgatcatctgccgtgtacgttctggcctgacaatattatccactgcgatagctaactgaccgcgccagccgttcgctatctgctgacattgctggcgggtgatctgcatttttttgacaacagagcgcccttctttgagaaaccacgctccagcagcggtcagctccacatcacggtgccgtcgttcaaagagcggcaccgccagccactcttccagctgacgcacggtatagctgaccgcagaaggaacgcgatgcagctcctgtgccgcagcgctaaaactaccattacgcgctaccgcatcaacaacttcgagtgaatattctgaccacatagtctgcctgcaaaatttttgaaaccagtcatcaaatattaccgtttcacaacactaatttcactccctacactttgcggcggtgtttaattgagagatttagagaatatacatgcaacctgggaaaagatttttagtctggctggcgggtttgagcgtactcggttttctggcaaccgatatgtatctgcctgctttcgccgccatacaggccgacctgcaaacgcctgcgtctgctgtcagtgccagccttagtctgttccttgccggttttgccgcagcccagcttctgtgggggccgctctccgaccgttatggtcgtaaaccggtattattaatcggcctgacaatttttgcgttaggtagtctggggatgctgtgggtagaaaacgccgctacgctgctggtattgcgttttgtacaggctgtgggtgtctgcgccgcggcggttatctggcaagcattagtgacagattattatccttcacagaaagttaaccgtatttttgcggccatcatgccgctggtgggtctatctccggcactggctcctctgttaggaagctggctgctggtccatttttcctggcaggcgattttcgccaccctgtttgccattaccgtggtgctgattctgcctattttctggctcaaacccacgacgaaggcccgtaacaatagtcaggatggtctgacctttaccgacctgctacgttctaaaacctatcgcggcaacgtgctgatatacgcagcctgttcagccagtttttttgcatggctgaccggttcaccgttcatccttagtgaaatgggctacagcccggcagttattggtttaagttatgtcccgcaaactatcgcgtttctgattggtggttatggctgtcgcgccgcgctgcagaaatggcaaggcaagcagttattaccgtggttgctggtgctgtttgctgtcagcgtcattgcgacctgggctgcgggcttcattagccatgtgtcgctggtcgaaatcctgatcccattctgtgtgatggcgattgccaatggcgcgatctaccctattgttgtcgcccaggcgctgcgtcccttcccacacgcaactggtcgcgccgcagcgttgcagaacactcttcaactgggtctgtgcttcctcgcaagtctggtagtttcctggctgatcagtatcagcacgccattgctcaccaccaccagcgtgatgttatcaacagtagtgctggtcgcgctgggttacatgatgcaacgttgtgaagaagttggctgccagaatcatggcaatgccgaagtcgctcatagcgaatcacactgatctatatcgatatacttatacttaggctgctaacaaaattttgttgtatgattgaaattagcggcctatactaatttcgagttgttaaagctacgataaatattatgtttttacggggacaggatcgttcccgactcactatggatagtcatttcggcaagggttcctcctttccctctgttctacgtcggattatagactcgcggttttttctgcgagatttctcacaaagcccaaaaagcgtctacgctgttttaaggttctgatcaccgaccagtgatggagaaactatgagttcatcgtgtatagaagaagtcagtgtaccggatgacaactggtaccgtatcgccaacgaattacttagccgtgccggtatagccattaacggttctgccccggcggatattcgtgtgaaaaaccccgatttttttaaacgcgttctgcaagaaggctctttggggttaggcgaaagttatatggatggctggtgggaatgtgaccgactggatatgttttttagcaaagtcttacgcgcaggtctcgagaaccaactcccccatcatttcaaagacacgctgcgtattgccggcgctcgtctcttcaatctgcagagtaaaaaacgtgcctggatagtcggcaaagagcattacgatttgggtaatgacttgttcagccgcatgcttgatcccttcatgcaatattcctgcgcttactggaaagatgccgataatctggaatctgcccagcaggcgaagctcaaaatgatttgtgaaaaattgcagttaaaaccagggatgcgcgtactggatattggctgcggctggggcggactggcacactacatggcatctaattatgacgtaagcgtggtgggcgtcaccatttctgccgaacagcaaaaaatggctcaggaacgctgtgaaggcctggatgtcaccattttgctgcaagattatcgtgacctgaacgaccagtttgatcgtattgtttctgtggggatgttcgagcacgtcggaccgaaaaattacgatacctattttgcggtggtggatcgtaatttgaaaccggaaggcatattcctgctccatactatcggttcgaaaaaaaccgatctgaatgttgatccctggattaataaatatatttttccgaacggttgcctgccctctgtacgccagattgctcagtccagcgaaccccactttgtgatggaagactggcataacttcggtgctgattacgatactacgttgatggcgtggtatgaacgattcctcgccgcatggccagaaattgcggataactatagtgaacgctttaaacgaatgtttacctattatctgaatgcctgtgcaggtgctttccgcgcccgtgatattcagctctggcaggtcgtgttctcacgcggtgttgaaaacggccttcgagtggctcgctaaaggctattctatcgccccctctccgggggcgatttcagatcaggcttctgtgcctggttgattcatggcattttctcgtgccgccagcacacgttctaccgtatctaccactgcctgagtttgtggatcgatttcaatgttgacgcgtgcgccaagttttttcttcccaagagtcgtgcgttccagtgtttccggaattaaatggacgcaaaaacgcgttggcgtgacttcgccgacggtcaggctaataccgtcgatgccaataaatcctttgtacagaatatatttcatcaactgactatcctggactttaaaccagatctggcgattattttctgaggttaatattttcgccacttcagcagtggtcataatatgacctgacattaagtgtccgccaatttcatcactgaatttcgccgcacgctcaacgtttacccaatcccccacttttaaatcgccaagattggtaatgcgtaacgtttctttcatcaggtcaaaactgacatggttgccgttaatttccgtcacggtcaggcagcaaccgttatgcgccacggaagcaccggtttccaggccgtccagcatgtggtcgggtaactccaccacatgcgtacgaaaatttggtttctcgtcaatcgacaccagttttgcggtgccctgtacaatccccgtaaacatacttacaactcctgaaatcagttaagacattctgttcagcacaatagcaggtggaaaacgcccttaccagtgaaggggtaagaatggctattttttcactggagaattaataaatcctcgctacaatagactgaatttcccctgcttcttctttttgctgcccattcaggcggctttttagtctctcatataactacaaataaaaggtgttcacgtgcagaagtatatcagtgaagcgcgtctgttattagcattagcaatcccggtgattctcgcgcaaatcgcccaaactgcgatgggttttgtcgataccgtgatggcgggcggctatagtgccaccgacatggcggcggtcgctatcggtacttctatctggcttccggcgatcctctttggtcacggactgctgctggcattaacgccggttatcgcgcaattaaatggttccggtcgacgtgagcgcattgcgcatcaggtgcgacaaggtttctggctggcaggttttgtttccgttctcattatgctggtgctgtggaatgcaggttacattatccgctccatggaaaacatcgatccggctctggcggacaaagccgtgggttatctgcgtgcgttgttgtggggcgcgccgggatatctgttcttccaggttgcccgtaaccagtgtgaaggtctggcaaaaaccaagccgggtatggtaatgggctttatcggcctgctggtgaacatcccggtgaactatatctttatttatggtcatttcggtatgcctgagctcggtggcgttggttgtggcgtggctactgcggcggtgtattgggtcatgttccttgccatggtttcttacattaaacgcgcccgctccatgcgcgatattcgtaacgaaaaaggcaccgcaaaacccgatcctgcggttatgaaacgactgattcaactcggtttgccgattgcgctggcactgttctttgaagtgacactgtttgccgtcgtggctctgttagtgtctccgctcggtattgttgatgtcgcaggacaccagattgccctgaactttagttcactaatgttcgtgcttccaatgtcgctggcggcagcggtaactatccgcgtaggttatcgtctgggtcagggctcaacgctggatgcgcaaaccgctgcgcggaccgggcttatggtgggtgtctgtatggcaaccctgacggccattttcacggtttcactgcgggagcaaatcgccctgttgtacaacgacaatcccgaggttgtaacgctggctgcgcatttgatgttgctggcggcggtatatcagatttctgactcaatccaggtgattggcagtgggattttgcgtggttataaagatacgcgttccattttctatattacctttacggcttactgggtgctgggcttgccaagcggctatattctggcactgaccgatctggtcgttgaacctatggggccagcaggcttctggataggctttattattggcctgacgtcggcagccattatgatgatgttgcgtatgcggttcctgcaacgtctgccgtcagccatcattctgcaacgagcatcccgctaataaagacaaggcgcaaccttcacgggttgcgcctgtatttttacgcaggctggagcgttgcgccaatcccgtcttcgtctggctgtaatttcagagcgttacacagagtttgccgactggcatctgttatctcaacgtgtatatccccggtaacttcccctttcacattgatgaagtcaggtgaaatttcttttgcactggtttgcaggcaaatcgctccctctccgcgcaggcgtttcactttcagttgcacatgcgttgccgcatcagtgatcagccacagttttccaccattcagattgatgttaccaacaatgaaagtgacactgtcaccttttaccgtactgccgtctagaatcaacacaccgccctgctgtacagtaatcgttgattgttgcagctctgcgccataaccaataatcattgaagcgccgtccagtaatgcaacactcccggtcagttcaaccggtgcgcgatcttcctctacgacaaaattttcgtccgcgctggtgggtgacaacaggatcactgtcccaccttgtattaccgcgttttccagcgtaccggcatgcacttcagcccgaccacccacattcacggacaggttttgcgtcttaccggaactgtagagctgaaggccatccgtccccagacgataaatggatccattctcaacaatagtgtcagagtcttcaccaccgagattattcatggtgccaccagcaagcaacgtatcactggctttcccggccagcataaaaacgccgccctgattaatctcacaattgctggcttccccacctggatacaccaacaattcaccaccttcatctaccacgaccgctgaggttgtcccattaaccaacaggccgccctcttgatcgagaatgattttttccgcgcgatgtccttccagtacacgcaggttaccgccattttccagcaacaaaccgcaggcataacctttatcaacgctgaattcaccttcgggatggcggccattaaccgtagcgagcgtagagagactaattgcgcctccctcggactgaacaatatctgtggcaatggcaccatcgctgaccgatagcgtgccattgttaccgtactgtgtgcatttggcgatcccaccggttgccactttcaaccagccagcccccgtgaccacggtattttcggctcttccgccagcttcaacaatcaactcgccttcagtaagttgcgtcgcgccaatgacctcgccggtcttaacaatttgcacgttcccgtcgctcatcaagtttttcgcatcagatcccatgatttattcctttgctgcatctgtgtgcctttattgctacctaagtgtaaaggctacggaggatttatccacgacagatttgagatggtggcaaacaactctgtttaaactctgatacacgaattattgggttgtatcagatgtaaatgcgatcctgaataaaaatcacccttgcaaatcaacaaaatatagccaatttgcttaaaagctctgcaaacggtcgaaatagcgcagaaaattacgttttgcctcttgccaccttcccactctgccgctaatattcgtccccgttgtcacctacaacgttgcgttcatagctcagttggttagagcaccaccttgacatggtgggggtcgttggttcgagtccaattgaacgcaccatcctgcgtccgtagctcagttggttagagcaccaccttgacatggtgggggtcggtggttcgagtccactcggacgcaccagattttcttaatctggtcttctcctttttccctctgtttcttctctgtatccaatacgttaaaagatttacactgtcttcgtatgcgttatcagaaggagaatcgctatggcaactttgttacaacttcattttgcttttaatggcccatttggcgacgcaatggctgagcagcttaaaccacttgctgagtcgattaatcaggaacctggttttctgtggaaggtatggacagaaagtgaaaagaaccacgaagccggtgggatctaccttttcactgatgaaaaaagcgcccttgcctatctggaaaaacatactgcccgactgaaaaatctcggcgttgaggaagttgtcgccaaagttttcgatgtcaatgagccacttagtcaaatcaatcaggcaaaactcgcctgacagaatttaatcaagggcggttagcgcccttttcatccctgtctgaaatttctcaaattctaaaaatctcaaccaaacttatctgataacactaaattcgaaagaatgcgtacaggtaagtaacaatgaaaaaaattgctattgtgggtgccgggcctacggggatctacaccttattctcgcttctacagcaacaaactccactttctatttctatcttcgagcaggctgacgaggccggtgtcgggatgccatacagtgatgaggaaaactcaaaaatgatgctggcaaatattgccagtattgaaataccgccgatttattgtacgtatctcgaatggctacaaaagcaagaagacagccatctccagcgttatggcgttaaaaaagaaaccttgcacgatcgtcagtttttaccgcgaattctgctgggcgaatatttccgcgatcaatttttacgactagtagaccaggcacgacagcaaaaatttgcagtggctgtttatgaatcatgccaggttaccgatctgcaaattacaaatgctggcgtcatgctcgctacaaatcaggatttacccagcgagacgtttgatttagcggtgatcgccacgggtcacgtctggcctgatgaagaagaagcaacccgaacgtattttcccagcccgtggtcaggcctgatggaagcaaaggtcgatgcgtgtaacgtgggtattatgggaacatccttgagcggactggatgcggcaatggcagtggctattcagcatggttcgttcattgaagatgataaacaacacgtcgtttttcaccgcgataacgcaagtgaaaagctaaatatcacgttgttgtcgcgcacgggtattttacccgaagccgatttctattgccctattccctacgagcccttacacatcgtcaccgatcaggcattaaatgctgagattcaaaaaggcgaagagggccttttggatcgggtatttagattgatagtagaggaaatcaagtttgctgatccagactggagtcaacgcatagccttagagagcctgaatgtcgattcctttgctcaagcctggtttgccgagcgcaaacaacgcgacccatttgactgggcagaaaaaaatctccaggaagtcgaacgcaataaacgagaaaaacatactgttccctggcgttatgtcattctgcgcctgcatgaagccgtacaggaaattgttccacatctgaatgaacacgaccataaacggttcagtaaaggccttgcccgggttttcatcgataattatgcggcaatcccttcagagtctattcgtcgcctacttgccttacgtgaagcgggaatcattcatattctcgccctcggtgaagactacaaaatggaaattaatgagtcgcgcaccgtcctgaaaacggaagacaacagctactcgtttgacgtttttattgatgcccgcggacaacgtccgcttaaagtgaaagatatccctttccctgggctacgcgagcaattacagaaaacaggggatgaaatccctgatgttggcgaagattatacgttacagcaacccgaagatattcgtgggcgcgtagcgttcggcgcgttgccctggttgatgcacgaccagcctttcgttcagggacttacggcatgtgcagaaattggtgaggcgatggctcgggcggtcgtaaagcctgcatcccgtgctcgtcggcgtctttcgtttgattaaaggtaaagctatcagcactcaacaaactgatgctgttcattaagacgatagcggactccggctcgaatattgttttcaccttcaatggcgacggcgaagcgaactctttcgccgtcatgatatgccagtgcggcgcttcctcctggcccgagaataattgagtcgaccacgcccgtgctcactaccgttgaattttcaccgctggcaatgatgtgtacattgtcgccgctgttggcaattctggcgtttgcgccaaagctggcgatttgcaccaggtcaccattactggcgacatgacaccgttcacccaatgtacaaacgcgtactcgcattccggtattcgcaatccgactgctatctccagcgctgcttatccgcgaagaattaccggttacagcaacccgtgcgcgttcaccggagctgccaatgtgactgttaaagccgacacttccaatccgcacgctataacccatactggcaatttgcgcggcatacccagcggttgcgattctggcgttatcctcacaacagccgatgcgagcatgatcgtcgctgcgggcaaactgactgcaaaatggtctctctccggggtctgtggccagtttttgcatagaggaaacttcctgatgcgcgaagttttcatccgccagccattttttccacgcatactcaaccagactctccgcccagtccgtatatccttcctcaatcagtgcatgatgaatatcggcataactaccgccgcgtgggaaatggcgcaggaaccagcgatacatcaccgctccgatacgccattctcgcaggtctgcttgtgtaatgatcattcgttagtgccggtgatagccatcgaccatgcttttaaaggtttcgtgtggcgtacgccccgtggtgcaaagataaagatgaccgaagataaaaaagaggcttataaatgccagagcaaaatgtgtctgcaataaccagtatcttacgccaggaaacacatctcccacggcttgcggatagagacacagcagccccgtcaatagtaacaacggcagcaatccatacatgacaccaacataggcgacctgctgtaagggattaaatttagactgggttgttgccgggaaaggatgttcttccccctgcataatgccaaacaaataaaatcgcgtttgttttgccgctcgttccagccacccctgacgacgaatgcgatagtggtgaccattatccccaacggcattgatcagcacaaagccgagccagcatgccagtaacaaaaatccgcaaacttcatgcaccgcaaccagacttttaaccgcagttgcgcccaccatcgcaaagtgatttatcagcccactggccagcaacaatacaaagagtaacgcattcgaccagtgccataatctgaccgctttgctgtaaagataaatcttctcaccatgatcggtggctgatttcttcacgccacgagcacgaagcaaggcatgcagccccagcaccaaccacatcccaaccagcaatactccggcaatgatcaaccacaccggccaaaattcgggagtgaactgtggcacatagttcgctaactggctctgaaactgttcagcatgttgcgacgggttcatacattttcctttttaatcaaatgttgaccgaaccggcgatacagatgcggtttcccggcaccaggtagctgatattgatagtatttattttgctgcaaccacgcctgaatttctgggctatcttcgcgaccaaagatcaatgcgtgttccgggcaggcgctgacgcaaatgggcggaaagccttttgccagtcgggactcagcgcagaaatcacatttatctgccactttagtgacagggttaaggtagcgaacctggtacggacaagcgccaatgcaataactgcagccgatgcactgcgatttttctacccgcacgatcccctgctcatcacgccacgacgcccccgtcgggcaaacgtcgatgcacggagcatcttcgcagtgctgacatgactggcgaaaaaagtgatactgcgtttcgttgtcgttatcggtgactggaatgtgtgctatcgataaacggcttccctgagcggggacgtggttagttttacggcatgcgcgggcgcaaatattacagccattgcaccgtgactcgtcatgaatcatggcataccgaacttccttttcttgcctcgtgttcgctaacagagaagacgcagaaccagtaaaaaagattactgttcccatccccagaacaaatttgcgtcgagtgaaggacatctgattatcccctaatgcagtggctgcaactgtccaccctatccatgacatctccctgaaatttcaggggttctgaaactgctctacctcgaaccattcgcataagccataagccttgccataggtcataaatcgctcgctaaacaagtacaacaccgccgtcgatgactccacctgccgtatatcggcatattcaggtgcaacatccatcgcggcgatcgcggcttcaatctgcgcttcctggaagtaatatggcgcttgcatcagcatggcgactttgtaaggacgaggatacgtctggcactcaaaacgaacggcgtgtgcaatggcgcgacaaatgtcctgctccacaacttgcaaagacatcgccgcgtagttttcactcatggcctgcgttgagtaatagtaatcatccttgcttcccgtcaaacaagcgatatccgcgtagtctccgttctgcttaatgctttccagcaaaactgacagttcctcttctgcaaccaaatagggtggcgagagaaacacggcgcgcgccaccagctgcccagccgcagaatgctggcgaatgaactcagccaggatttcagcaggttctggttcggttaccgtatcaacggggtgacgcatcccctgcaaccattgccgcttcgcctcgtcaacttcgctgactttcgctaacggcaattcatcctgatggttcatcttacccattccttacgcaggcagtagattgtgtgctgccagatcggcggcaatatcttccagccccagacgctgcaatgtttcgcgggttggacaaccaagctgtgggtcccagcccatttctttgtagaacatcgtgagcgaagcatgcatatcgtcacgatccattttgtcagtaccttcagtaaagaccgggatctgcggatccttgtcgaatacccaggaacagataagatcgtgttcattacgcatatctttggtttgcatcagttttaccgtgtaggcacgatgcaacgtaaaaatacgctctgcagctaaatctaatttttcctgagtcatctcttcgccggtgatcgctttgaagaatttggcttcaagcgccagatcgccccggtaattacggcttttcagcggcgaaacggtcattggccagacccagttgcacagggtgacggcgttatgcaaacagacccgcaacagcgaccactttgcatatttaatttttgcgtcattgattggcgtgtagtttttggtttcatcgtaagcatcttcagaaccaaaaagttctttcgccacttcacgttgcagtttcaatggcaagccggaaccaataaagttgatatgggtatgcgtcatgcagtcacggttgaacatacagttaacaatggaaccgacctgcgctgacgcttcattggcatggtgaaccggatagccaaacggcgaccagagtttatttttcgcgtagccccagtactcttcacccaaattccagcgttctgcgatggcatatgaaccatcagccaggtgactcagctcacccacacgatgcgccagacggtagtaaaaatctttaatgaagttaacgtcacccgcttccagttgatcccagcgaatttctgcatactcttcagctggcagaacacgcttgaacacacctttgctgtaacaataagtaaagtcgcgatgcaactgcccgtagttacaccataggccgtagtcatcgaacaaattcagacccaccaggttaccaatcacacgaccatcgtctttatcttcaaaatctttcggcccgttcgggaagatggtggtatggacaaagtttgctacacaagtgttaccacctgtgctgggcacgccaaactctttcacccgaggaatattcatttgggtcatacaacggatcgggcaagagtggcagccgctcatttttactgtgtatttctctgccgccggtcctaagtcaaaaacggatttataggtacgaaagccgaccgtattctgattgcctggcggaatttcacccgtttcaatcggaccaccttcagccgcgccccaaaacagccctttacgtgctgtccagcgtgacttgggatctgaatactctgcccacgattgtggcgtacttggcacgacatggttgttattcgcaccaataagttcagtcatcatgtaatcattgagacgcttcatctcctgacgatcggcaatgttgacccctttcgtcccttcaaccgcaatcgctttcaggtttttcgaacccattattgcgccagttcccgcaccgccgctgtggttacggctattcaacatgccagagagaggaacaaggttttccccagcctgaccaatagccgccacacaggtttccggactggtcaatcgacaaatttcttccgtcgttgcgcgcgtcccttttccccataagaaatcggctttttccaggctaactttgtcatctttaatcttcagccataccggtgatttcgccttcccttcgataataatgacgtcgtatccagcgaatttcatttgcgctgcaaaaaagccacccatatgggcatcgacgactaaatttcctttggtaaaagtagaaagtgaggtgatatttacgcgagaactacagggggcaccagatccagttaatgggccggtagcaaagactaatttattcgcttcatcgaaaggtttcgtgcctggcggtacttcgtcatacataattttgtagccgaagcccatgccaccgacaaaacttttaaacttactggaatcttcgagggtaatatttcctgtcgtgagattgactcttaatatattacctgtccaaccgttagccatgattttttcctttgcaagattcacacagtaatatctttccactcgataatttttaacgcccctgttgggcaggcgtttgcgcattcaccgcataacacacatttcgaggattttttactttcggtatttacggtggccatcatccacgggcatgccgtagtacaggcgctacagccaatacagcgtttatgatcgacggtaatacagccttctttctgctgccaggtaatcgcaccaatcgggcagacgttcatgcattgcggctctttgcattgacggcaggtgtccgcggtatagttgagatcgccatacaggccgccgccagagccaaccccgttgtcgccaaagaaataattgcgatggattttgatacgggagaagaatgtccctactgagccatcgttgaagttggtacaagagatttcacagcggtggcaacccgtgcatcgcgctcgctgggtcaccagcacccctttgggggtatttatcaaccctactgtgccgctatcaatatcttcctgtttgcaacccaaaagtgacagtaacgcaggggcaattgttagaccagcaaggccttttcctgatatacgcaagaattctaatcgcgttaagccaatatctaatagtggacgatcaaccgggttcatttatttcgcatcctcttcgcaaacacagtgctgacaattcagcagcctgatattaagcattcaactaatacgctgctgactctgtccccaacaccagatattttccctaacccgatagtgtatgagaaaagattaacgccgataaactaatcctttatggttaggagaaaaaataatgtgattattctgagcccttaacattgatcgttatcaattaaaattacaaagcaagaaattataagtgaactgatatttattatcatttgaaataaatttaacttaagcgacaattatttgtgactttcattgcagaaaataaaaataacattatcgctataaattaaaatacataccgaaattcgtataatttcagcagttgttatttagaatgattaactggaccgcaactgaagcaagaatatcaggatgaagcttaccgcctcatcctgaatggtcattttaccagtgcgttaatgacggtttccatcgcctgcttttccagctcactgcgctgaatgcgtttattggctaatgctgtacgtaatacgcctgcgataacaatatgctttggttcctgccccagatcgcgcatttccagcacaactttaccgacaactctgcacatttctcggtacagttcatcctcttttgtccgatttcccattctttatacctatttatcatgccaactatcagcatatatcaatctaaccaattaaacaaaaatcaaacaaaatcagacaaataacgcgataaattattttaactgtagcaattgagcgatgatatatttatacaccggatgaactttcacttatcctcacactgacaacttcggcaccagacgttgcgcaaacagtgaagtttttgcgtaaccttttccctggaacgttaaatctttgataacaatttattgtctaacaagttgtatattttttgaaacgctgtttttgttttccttttggattaatttcagcgtataatgcgcgccaattgactcttgaatggtttcagcactttggactgtagaactcaacgactcaaaaacaggcactcacgttgggctgagacacaagcacacattcctctgcacgctttttcgatgtcacctatccttagagcgaggcaccaccactttcgtaataccggattcgctttccggcagtgcgcccagaaagcaagtttctcccatccttctcaacttaaagactaagactgtcatgaaaaagaccaaaattgtttgcaccatcggaccgaaaaccgaatctgaagagatgttagctaaaatgctggacgctggcatgaacgttatgcgtctgaacttctctcatggtgactatgcagaacacggtcagcgcattcagaatctgcgcaacgtgatgagcaaaactggtaaaaccgccgctatcctgcttgataccaaaggtccggaaatccgcaccatgaaactggaaggcggtaacgacgtttctctgaaagctggtcagacctttactttcaccactgataaatctgttatcggcaacagcgaaatggttgcggtaacgtatgaaggtttcactactgacctgtctgttggcaacaccgtactggttgacgatggtctgatcggtatggaagttaccgccattgaaggtaacaaagttatctgtaaagtgctgaacaacggtgacctgggcgaaaacaaaggtgtgaacctgcctggcgtttccattgctctgccagcactggctgaaaaagacaaacaggacctgatctttggttgcgaacaaggcgtagactttgttgctgcttcctttattcgtaagcgttctgacgttatcgaaatccgtgagcacctgaaagcgcacggcggcgaaaacatccacatcatctccaaaatcgaaaaccaggaaggcctcaacaacttcgacgaaatcctcgaagcctctgacggcatcatggttgcgcgtggcgacctgggtgtagaaatcccggtagaagaagttatcttcgcccagaagatgatgatcgaaaaatgtatccgtgcacgtaaagtcgttatcactgcgacccagatgctggattccatgatcaaaaacccacgcccgactcgcgcagaagccggtgacgttgcaaacgccatcctcgacggtactgacgcagtgatgctgtctggtgaatccgcaaaaggtaaatacccgctggaagcggtttctatcatggcgaccatctgcgaacgtaccgaccgcgtgatgaacagccgtctcgagttcaacaatgacaaccgtaaactgcgcattaccgaagcggtatgccgtggtgccgttgaaactgctgaaaaactggatgctccgctgatcgtggttgctactcagggcggtaaatctgctcgcgcagtacgtaaatacttcccggatgccaccatcctggcactgaccaccaacgaaaaaacggctcatcagttggtactgagcaaaggcgttgtgccgcagcttgttaaagagatcacttctactgatgatttctaccgtctgggtaaagaactggctctgcagagcggtctggcacacaaaggtgacgttgtagttatggtttctggtgcactggtaccgagcggcactactaacaccgcatctgttcacgtcctgtaatattgcttttgtgaattaatttgtatatcgaagcgccctgatgggcgctttttttatttaatcgataaccagaagcaataaaaaatcaaatcggatttcactatataatctcactttatctaagatgaatccgatggaagcatcctgttttctctcaatttttttatctaaaacccagcgttcgatgcttctttgagcgaacgatcaaaaataagtgccttcccatcaaaaaaatattctcaacataaaaaactttgtgtaatacttgtaacgctacatggagattaactcaatctagagggtattaataatgaaagctactaaactggtactgggcgcggtaatcctgggttctactctgctggcaggttgctccagcaacgctaaaatcgatcagctgtcttctgacgttcagactctgaacgctaaagttgaccagctgagcaacgacgtgaacgcaatgcgttccgacgttcaggctgctaaagatgacgcagctcgtgctaaccagcgtctggacaacatggctactaaataccgcaagtaatagtacctgtgaagtgaaaaatggcgcacattgtgcgccattttttttgtctgccgtttaccgctactgcgtcacgcgtaacatattcccttgctctggttcaccattctgcgctgactctactgaaggcgcattgctggctgcgggagttgctccactgctcaccgaaaccggataccctgcccgacgatacaacgctttatcgactaacttctgatctacagccttattgtctttaaattgcgtaaagcctgctggcagtgtgtatggcattgtctgaacgttctgctgttcttctgccgatagtggtcgatgtacttcaacataacgcatcccgttaggctccacggaatatttcaccggttcgttgatcactttcaccggcgttcccgtccgcacgctggagaacaaggctttaatatccggtgcattcatgcgaatacaccctgaactgacgcgcaaaccgacgctgtccggcgcactggtaccatgaatgaggtattcgccattaccatgcgcgaggcgcagtgcgtaacgtcctagcgggttatttggtccggcaggaacgactggcggtaatttaatgccacgctccagcgaacgctgacgaatgcctgccgtaggcgtccaggttgggttagggattttctgcccaacacgcgtttccatcaccggcgtttccagcccctgcaatccaatacctattggataaacctgcacaatattttctcccggcggataataataaaggcgcagctctgcaaggttaacgataatcccctgacgcggtgcatcaggtaataacagttgtgaaggaatagttatcgtcgtaccaggttttggcaccggggcgatagtgttattggcttcaaggatcaacattgccgcagtatcaaaacgtcgggcaatagcctgaaggtttttatccccttcttgcaccgtatacgtttgattttgcccaaccagtcggcttccggttggtggtagcggataatcaaccgcccaggcagcctggatggcgctaaaagcgccgataagcgtgagtgtaagcaaagacgcgcgtttcattgtaaacctcctgtatttgccggagactcacgctgaaacgtcggatggcgcttatgttcacctgaaaccaaaacactcctgtgcaggtcagtgtaaacattgaccatccggcaatgtgagccaaccggatgaaagctgtccttttagtttagctaagtgcagcggctttggcgcgaattgcgcgaatcatcgcttccagaccttgtgaacgagatggggtgagatgttgggtgagcgccattttttcaaaccacggacgcacatcgaaattgacaatatcctgcggcgtcatctgatcgtagagaataaagacgaccgcaataagccctttcacaatcgccgcatcgctgtcgccctgtaattcaataattccctgggcattctggcgcatgacaatccacacctgactctgacagccctgaatgctattttgtggacttctgtcttcgtcgcgtaattctggcagacgctggcccagctcaataatgtagagatatttctcttcccagttggcgcagcgtaaaaaattacgcagcaacttttctttatccggcaataaagccatagtgcctccctgttatcccagcaaacggtgaatacgttgcaggccggtcaccagacgatccacttcttcatgggtgttatacatggccagcgacgcccgacacatcgcagggacgttgtaataggccatcaatggcattgcgcagtgatgtccggtacgcacagcaatgccgtaattatcgagaaaactgccaacatcataggcgtggtgtttaccgagattaaaagcaataacgccaagcctgttttgtgggccatagagagtgagatccggtacagattccagctgtgatagcgcataatgcatcagattctgttcatactcggctatgttattaagccccagcgccgaaacatactccagcgccgcgccaagaccaatgatgcccccggtattgggtgtaccggcttcaaaccgccatggtgctttggtccaggtagtgccttcactcaggctgacggtggcgatcatagaaccgcccccttcccacggcggcatctcctgcaacaaggcttctttcacataaagaatgccaattccggtggggccatacagtttatgcccggagaacacgtaaaagtcgcaatccagcgcctgaacatccaccggatgatgcatcaccgcctgagcgccatccaccagcacttttgcgccatgctggtgcgcaagcgtgatcatttccgccagtggattttctgtgccaagcacgttggagacatgagtaattgccagcaggcgagttttctcatcaaacagcgtaggcagcgtctccagttgcaacgtaccatcgggattgagcgggatcacacgcagctctgcgccaacgcgtgcgcaaagcatctgccagggaacaatgttagcgtggtgctccatctgactgatgatgatgttatcgcccgcccgcacgttgctgttgccccagctattggcgaccagattgatcccttccgtcgtgccgcggacgaacaccagctcttccgccgaacgggcattaataaacagcgatgcccgcttgcgcacgttctccattttctcggtcgcctgggcgcttaaggtatgaataccacgatgcaccgccgcgtagccatgacgataaaactcggcctcggcgtcaatcacctggctcggtttctgcgcactggcggcgctgtcgagataagccagcggcaaaccgtttacctcacgcgaaagcaccggaaagtcggcccgcactttgtcgacggaaaaaatcatcttgcacctcctggcagccgttgaccgattcgggccagcacctgctgtttaagcccctcatcacgcagtgcttccgtcagttcggcagcgaaggcgtaaatgatcatctgctgggcatcctgctgattgatcccgcgcgagcgcagatagaatatctgttcatcatcaatacgccccaccgtcgcgccgtggctgcatttcacatcatctgcatagatttccagctgcggtttcgtatccacttccgccagtttgcccatcagcagattgttgttggtcatctgaccatccgttttgatggcgtgctgcgcgacgttgatcaaaccgttaaataccgcgcggcctttgtcgctgacgatagttttgtgcaactgtcggctgttacaaaaacctttattgtgttccagccaggtacgggtatcacacacctcgtttttcaccggcatcgccaggctattgatccgcagcgtgctgttttcgccattgagttgcgtactggtgttgtgtcgtaacactgcgccacccagcaggaaactgtggctaaatgcggtggcatcctcagccagcaacaaatcgttatgagcaaagtggtgactgagcgggttttcaaacgccagcttgatatgctgcaagtgggcattcgctgcgacgttgatagtgaaccgtgccccggtaaaatgacgagcatcattcaggctgacaaaatgttcgatcaccgttgcttcggcaccttccgccagatccagatgatgtcggtaatgggcagtgttcacctcttcacctgccacgccctgggtgatatgcattaacagcaatggctttgccggccgttgaccgcgcttcacggcgatatgcgtcacgctttgtgccaggctttccgtcaaatgcagaaacacttccgcctgaatagcgtcgggtaaaccctgacggtcgtcgttaatgctcacttcatatccgctgccttcagttgcatcgctcagtgcgggcacgtaacgcccatcgacaaacaccagccgcacggagtctaacgttaacgctaaggcatcacgctgctgtggggatatctctcccgcaatgctgacaaactggctattgatcagcccttccagcggcgtatatttccagttttcatgtttacgtgtcggcagtccggtacgcagcaattgttgtaaatgctgctgtgcttgcggggagcgttttgtcccttcagcttcaaacaagtgatgccactgttgcagcgcgttactgctgttcggtaagccagccataaccctgctcctccagttgtttgaccaacgtgaaatcgccggatttcacaattcgtccctgatatagcacatgaacgtaatcaggcttgatgtagtcgagaatgcgttggtagtgcgtaacaatgatgaatgagcgcttgccatcacgcagcgagttcacgccatcggcgaccacttttaatgcgtcaatatccagcccggagtccgactcatcaagaatgcataactccggttccagcaccgccatttgcaaaatatcgttgcgctttttctcgccgccggaaaaaccaacgtttaccgaacgggttaataaatcttccggcatcttcaggagagcgattttctcttccatcaaatcctgaaaatcaaagcggtcgagcgtttcctggccgcgatagctgcgcaccgcattaagtgccgtttgcaggaaaaactggttactgacacctggaatctccaccggatactggaaggccataaagatgccttcgcccgcgcgatcttccggcgacagcgcaagcaaatctttgcctttgaactcaaccgtgccgcccgtcacttcataatcttctcgcccggcaagcgttgccgataaggtacttttgcccgaaccgtttggccccataatggcgtgaacttcgccgggatgaacgtcgaggcttaatccgcgcaggatagctttatcttccacgctgacgtgtaaatctttaatacttaacatgtttattccttatccgacgctgtgttcaagactgatggcgaggagtttttgtgcttcaacggcaaattccaacggcagctccgagaacacgtctttgcagaaaccgttaacaatcatcgagatggcgtcttcttcgctgatcccgcgttgcaggcagtaaaacagttgatcttcaccaatacgtgatgtcgttgcctcgtgttccagttgcgcactattgttacgacactcaacatacgggaaggtatgcgccccacaattagcgccaatcagcattgagtcgcactgagtgaaattgcgcgcattggttgccgtcggcatgattttcactaagccgcgataactgttctgactatgtccggcagagatccctttcgagataatggtcgatttggtgtttttaccgatgtggatcatcttggtgccggtatccgcttgctgatgaccgctggtcagcgccactgagtaaaactcaccaatggagttatcgccgcgcaaaatgcagctgggatatttccacgtaatcgctgacccggtttctgattgcgtccatgacattttgctgttttcgccttcgcacaaagcacgcttggtgacgaagttgagaataccgccggtgttgttatcgccaggaaaccagttttgtaccgtggaatatttcacctcggcgtttttatggatgatgacttccaccactgccgcgtgtaactgatagctgtcacgcaccggagcggaacagccttcaatgtagctgacgtagctgtcttcgtcggccaccagaatggtgcgctcaaactgcccggttttttctgcgttaatgcgaaaataggtggaaagttccatcgggcagcgcacgcctttaggcacataaataaacgtaccatcagaggctaccgccgcattaagcgcggcaaagaagttgtcattccccggcaccacggtgccgagatatttacgcaccagttccgggtgatcgtggatcgcctcaccaaaggaacagaaaataattccctgctccgccagtttttcgcgataagtagtggcaaccgaaactgagtcgaaaatggcatccaccgccacctctttgccttcccgcacgggaacgcccaactgctcaaacgccgcctccacctctttacttaaaaaggcgttcgcgccagtttgctgcaccgcgccaggttcagacgcgcaagtgtcgtcacaattaccgcacgatggtgctgagtagtagctgtaatcctgataattcagcttgtcgtagtgcgctttcaaccagtgcggttcttccatctccagccatgcgcgataggcgtttagacgaaactccagcatccactccggctcattacgcttcgccgaaattgcgcgcaccacctcttcgtttatcccctttgccagctcatcggtggctaactgggtgaagaatccttctttataattcagcgggccgccggtccaggttttgacatcgtcagttgcttcagtattacgagacatagtaccgcctataccccaaagctttcgccacagccacattcattctgggctttagggttgtgaaatttgaatatctgattaagtccttcacgaacgaaatcgacttccgtgccatcaataaacggcatcgcttgcagcgggacaaacagcttcgcgccgtcgtgttcaaacagcagatcgtctttgtccggctcgctaacactgtcgagcacatagccaaagcccgcgcagcccgtttgcttcacgcctaagcgcacgccgaccatacccggctgctttgccaccagctcacggatgtgtatcgccgctgcgggtgtcagcgttaagccttgccaggcgaaatcttgtgggttaaaggttcctgaatgcatgtccatcgatttacctcacttcatcgctttcagcgtataacagcatgttagtgataatgattatcagttcaacccagcaaacgcaggggctttaccgtaaaacatgctttttgcctgcttttaataagcatagaccctgatgtgtgggttaacaggcacgctaagaattaggtatctcattgttagataatggttattatctaaggagcattaaggctgtgatgaaaaagaaaaagttgtattgaaaatgactatttaagagataggtaaaaaagtgcagcgttcagaaataagaaaacccttaagtctgtgcgacacaggcttaagggtttctaccccatccggcgcttatctccggcactctcagtggcttagctcttgaaggggcgataagaataatctcataaagctaacccgccgttttaacacaaactgcgattagtattatttttgaacaatatcaggcggtagataagcagtattaagaaggtcatcgaacctggacggaggttaatccaggtcgatttggcgaacttgcggcattaagtcaggatcaatgcacgcccagacgccaggcaaagtagatttcttcttttaattcagcagaagagagagtaagcaggtcagcaaattcaagttctagttgtttcagacgtttgagatattgggcaggtgaaagattgctctggtcacggcgtaaaaattcaatggccagctgggtgggatcaagttgagtagacatagcatcctcgcttttagacaagacctgcacagtataccaccgtttactgtgcagataatgaccaaaagcaatatgcgtcacacttttctggtgacaacgtcacaaaatggcggtcgtcaatcgtgacgaacagcacaaacgccctttctcatcgaagatttcaatctgccagacctggtgacgcgaaccgagatgcaacggtttgcatacgccgcgcacccgcccttctcgtgccgagcggacgtggttagcattgatttccagaccaaccactttttgctcaccttcggtacataaataaccggcaacggaaccgatactttcggccagtaccacggatgctcctccatgcagcaacccgaaaggctgctttgtccgcgagtctactggcattgtcgcttcaagggtgtcatcaccaatatgttcaaagcgaatatccaggaaccccaccatgtttccttcacccatagcattcagtgcttccagggtgattttccgtttccatatcatttaataatctccagtaaagcctgcacaggatggcgtacccccgtgccttcaacccgttttacctggctacggcaggaatatccggtcgccagacagcggttacgcggcagtcgctgcatagcctgatgccaggataactcatagatcccgagcgaattttcatggtttttcgcttcatgtccgtaagtccctgccatgccgcagcaacccacgctgacattttccagtttcgcgccaaaacgggcaaatatcgcggcccattgtgctggcgcacccggcaaggcggtaacttcggtacagtgaccaaagaaataccatgattcaccgctgactgtagccactggctgtgactcaagtgcgcttgccagccattcattcgccagtaagacgttaaactcgccacgctcctcgcccagcgccagtttatattcatcgcgataacaaagtaccagcgccggatcgacgcccaccattggcatacccagcttcgccatacggttgaggaaatccgccgtctttttcgccgtcttcgcaaaacgattaagaaaacctttaatatgctgggctttgccatttggcgaaaatggcagtaacacaggctggaaacctaatttttcgaccagacggacaaaatccgccaccacttgcgcatcgtaatagctggtaaaggggtcctgcaccaccaacactgtgcgcgctttctgctctgcattgagagattcaagctgttccagcgtcatgtttgccgagcgatgccccaccatttgttgttgtagcgaggggaccgacagcagcggcaaatcaaccatgccgatatgtttttccgagagtttgcgcaccagcggctggttaatgaagaagttaaaggttttcggcgcgcgtgccatcagcggcgcgtagctctcgaccgtagcgacgaggtggtcgcgcagcgggcgtaaataacgggtgtgatagagctgcagaaaacgagagcgaaactccggcacatcaattttgatggggcactgggtcgaacacgctttacaggccagacagcccgacatcgcctctttgacttcgtgtgagaagtcatattcgcctttattcgcatgccagctattgcgcgtgcgggcaattaacgtccgcaaactgacgccggattcaggcagttcttgttccagtttgagtggatcaacgccgcgatccgccaacaaacgcagccattcacgcaccagcgttgcgcgccctttcggtgaatgaatccggttctgggtgatcttcatcgacggacacatcggactacgggcatcaaagttgaagcataaaccgttgccgttacactccatcgcaccgcgccactgctggcgtaccgcaatggggatctgccgatcgaatgtaccgcgcttcaccgcgtccactttcatcatcggcgcatcgagaccttctggcgggcaaatcttccctgggttgagtcggttatgcgggtcaaatgccgctttcactttgcgcagttctgcaaaaagttcctcaccgaaaaacgccgggctgtattcagcgcgaaaacctttgccgtgctcgccccacaacaaaccaccgtatttcgcagtcagcgccaccacgtcatcagagatttgcttcatcaaaatctcttgttgaggatcgcacatatccagcgctggacggacgtgcaagacacctgcgtcgacgtgaccgaacataccgtagcttaagccgtggctgtcgagcagcgcgcgaaattcagcaatataatccgccaggtgttccggcggtacgcaggtatcctcagcaaacggaattggcttagcggcacctttggcattgccaagcagaccaacggcttttttgcgcattgcatagatacgttcaacccccgccagctcacggcacacctgccagccgatgacacctgcttgatgactggcgatcagctcatccaaccgcgcacagagtgcatttacccgctcatcaatcagcgcctcatcatcaccagcaaattccacaatgttcagcccgagcatctcttggtcaggcacatcggtaatcaactcgctgacggaatgccagacaatatcttcccgcgccagattcagcacttttgagtccaccgtctctaccgaaagcgcccgcgcctcaaccataaacggcgcgttacgcagcgcagagtcaaaagagtcatatttgacgttcaccagacggcgcactttaggcaagcgtgtaatatccagccgcgcttcggtaataaaggccagcgtcccttctgaacccgtcagaatgcgcgtcaggtcgaactcggtcatctcatcgttaaagacatgacgcagatcgtaaccggtaagaaagcggttaagtttggggaagttgtcgataattaactggcgttgctgacggcaacgttgataaaccgtgttataaattcgcccgattgtggtattggatttacccagcgtttccgccaattcgacgggtaaaggttgcgtatcgagaatatcgccccccaacaacaccgcgcgtacgccaagtacgtgatctgacgttttgccatagaccagcgatccctgaccggatgcatcggtattgatcatcccaccgagcgttgcccggttgctggtcgaaagttccggcgcaaaaaagtagccgaacggtttcaggtactgattgagttgatcttttatcaccccggcctcaacgcgcacccagccctcttcagggttaatttcgatgatgcggttcatatggcgggacatatcaacaataatcccctggttgagcgcctgaccgttagtgccggtgccgccgccgcggggggtaaagatcagcgatgaatagcgttcctgcgcggcaagacgggcgatcagcgccacatctgcggttgaacgcggaaataccaccgcatcggggagaagttggtaaatactgttgtcggtcgacattgtcagacgatcggcataacttgtcgccgtatcgccggtaaaaccttgttgctccagctcttgcaaaaaattaagcaccagttgaacgacgccgggtgcctgggaaatctgtggaatcattatattgaccctttcctgcggtctgtgatgtaggtcgatacactattctttcaggctgctgcaatagcgcactgaaaggtgatgtttgtttactctatggatttcgtgttgcaggaaggcggcaagcgagtgaactccaggagcttacaatagtaagtgactggggtgaacgaacgtagccgcagcacatgcaacttgaaatacgacgagtaaatcgtttgcgtgttgcctgagttgttgtaccacatttttttctaacacgcccatcagaattaagggcagaatcggcctgttaaaaaccgctgaaattgctcatcattatgcaggtgagtttcgcgtgttcacgtcgcgtcgacgatttgacgcacaaaaaaggtgaaaagtagttatggtaaatgttcgtcagcccagggatgtcgcacaaattctgctttcggtgctgtttttagccatcatgattgtggcatgtctgtggattgttcaaccctttattctcggctttgcatgggccggtacggtggttatcgccacctggccggtattgttacgtttgcaaaagatcatgtttggccgccgctctctcgccgttctggtgatgacgctgttattagtgatggtgtttatcatccctattgctttgctggttaacagtatcgtcgacggcagcggcccgctaattaaagccatttccagcggtgacatgacgttacccgatctggcgtggcttaataccattccggtgattggcgcgaagctgtatgcaggctggcacaacttgctggatatgggggggacggcgatcatggcgaaagtccgcccttatattggcaccaccaccacctggttcgttgggcaggcggcgcatatcgggcgctttatggtgcattgtgcgctgatgcttctcttcagtgccctgctgtactggcgcggtgaacaggtggcacaaggcattcgccattttgcaacccgtctggcaggcgttcgcggagatgccgccgtgctgctggcggcacaggctatccgcgcggtggcgctgggtgtggtggtgacggcgttagtacaggcagtgcttggcggtatcggcctcgccgtatccggcgtaccttatgcaacgttgctaacggtgttaatgatcctctcctgccttgtccagcttggcccgttgccggtactgattccggcgattatctggctctactggactggcgataccacctggggaacggtattgttagtgtggagcggtgtggttggcacgctggataacgtcatccgcccaatgttaattcgcatgggtgccgatttaccgctgatcctgattctctctggcgttattggtggtttgattgctttcgggatgatcggtctgtttattggtccggttctgttagccgtttcctggcgtctgtttgccgcgtgggtggaagaagtcccgccgccgacggaccaaccggaagaaattctcgaagaacttggcgaaatcgagaaaccgaataagtaatttctcatcaggcggctctgccgcctgattgttaaccaccgctaattgatatttgcttgctcttccccatattttcctgcttaccgccattcagctggtagtacctgtcgcaaattctttacagtttttaaactaatgagacgaatctgatcgacgcaaaaagtccgtatgcctactattagctcacggttataaatcaacatattgatttataagcatggaaatcccctgagtgaaacaacgaattgctgtgtgtagtctttgcccatctcccacgatgggcttttttttaacatttttccgcttcgctacctcgcccctcactctttccaataatgttgcacaagatactgtgactctcttcaagccgtcagcaggctgataatgttatttatattttattgtttatttcatgcagccattacacgatgaacgcttatgaactccaggcactccgccatatttttgccatgactattgatgaatgcgcgacctggattgcccagaccggtgacagtgaaagctggcgtcagtgggaaaatggcaagtgtgccattcctgatcgtgtagtcgagcaactgttggctatgcgtcagcaaagaaaaaaacatcttcatgccatcatagagaaaataaataaccgcatcggcaacaacaccatgcgttttttccccgacttaaccgcatttcaacgagtctaccctgatggcaattttattgactggaagatctatcaatcggtagctgctgaattatatgcacacgatctggagcggctttgttaatttttccacagaaaggaattgtcgttgttacaacaataatgaacggatgctgacacaacatcgcttcactttttaaagcacctttgctaagtagaacctatgaaaaatccctatttccctaccgcacttgggttgtattttaattacctggtgcatggtatgggcgtccttttgatgagcctgaatatggcctcgctggagacactttggcagactaatgccgcgggtgtctcgatagttatctcatcgctgggcattggtcgattaagtgtcttgctttttgcaggattattatccgatcgctttggtcgccgcccttttatcatgctcgggatgtgctgctatatggccttcttttttggcatcctgcagaccaataacatcattatcgcttatgtttttggctttctggcgggaatggcaaacagttttctcgatgcaggcacttatcccagtttgatggaagcttttccacgctcacctgggacagccaatattttaattaaagcatttgtttccagcggacaatttttattaccgctaatcattagcctgttagtgtgggctgaactgtggttcggttggtcctttatgattgctgcaggcattatgtttattaacgctctgtttttataccgttgtacgttcccaccccatccgggtcgtcgcttacctgtcataaagaaaaccaccagctctacggaacatcgctgttcaattatcgatttagccagttataccttatatggctatatctcaatggcaacgttttatctggttagccagtggctggcacagtacggacaatttgttgcaggcatgtcatacactatgtcgatcaaactactcagtatctacaccgtgggttcgctgctttgtgtatttattaccgctccactcattcgtaataccgttcgcccaacaacattactgatgctgtacacctttatctcatttattgctctgtttaccgtctgcctgcatcccacattttatgtggtgataatatttgcttttgtcattggttttacctctgctggaggtgttgtgcaaattggcctgacgttaatggctgaacgtttcccttacgctaaaggtaaagctacagggatctattacagtgcgggcagtattgcgacctttactattccgttgattacggctcatctgtcccaaagaagtattgccgatattatgtggttcgataccgccatcgctgccatcggttttttactggcactgtttatcggcttacgcagccgcaaaaaaacgcggcatcactcgctaaaggaaaatgtcgctccgggtgggtaatgcaatattcttttcaggtcatgcaagatcttacggataaataactctttctgcgctaactaaggaaaatcgcgatcaaaaacaaactatgacatgcaatattcctggaaacataaactttatgccatgtacccagggaaaatcatcttcagtatagtaattatgtaaaccgtcggagaacaatacgtacggtaacgaaattatctttcagcaaggagctgtgaaaatgtctcaaaataaggctttcagcacgccatttatcctggctgttctttgtatttacttcagctacttcctgcacggcattagtgttattacgcttgcccaaaatatgtcatctctggcggaaaagttttccactgacaacgcgggcattgcctacttaatttccggtatcggtttggggcgattgatcagtattttattcttcggtgtgatctccgataagtttggtcgtcgggcggtgatattaatggcagtaataatgtatctgctattcttctttggtattcccgcttgcccgaatttaactctcgcctacggtctggcagtgtgcgtaggtatcgctaactcagcgctggatacgggtggctaccccgcgctcatggaatgctttccgaaagcctctggttcggcggtcatactggttaaagcgatggtgtcatttgggcaaatgttctacccaatgctggtgagctatatgttgctcaataatatctggtacggctatgggctgattattccgggtattctatttgtactgatcacgctgatgctgttgaaaagcaaattccccagccagttggtggacgccagcgtaactaatgaattaccgcaaatgaacagcaaaccgttagtctggctggaaggtgtttcatcggtactgttcggtgtagccgcattctcgaccttttatgtgattgtggtgtggatgcccaaatatgcgatggcttttgctggtatgtcagaagctgaggcattaaaaaccatctcttattacagtatgggctcgttggtctgtgtctttatttttgccgcactactgaaaaaaatggtccggcccatctgggctaatgtatttaactctgcactggcaacaataacagcagccattatctacctgtacccttctccactggtgtgcaatgccggagcctttgttatcggtttctcagcagctggcggcattttacagctcggcgtttcggtcatgtcagagttttttcccaaaagcaaagccaaagtcaccagtatttatatgatgatgggtggactggctaactttgttattccactgattaccggttatctgtcgaacatcggcctgcaatatatcattgttctcgattttactttcgcgctgctggccctgattaccgcaattattgtttttatccgctattaccgcgttttcattattcctgaaaatgatgtgcggtttggcgagcgtaaattttgcacccggttaaacacaattaagcatagaggttaaaggagttaattatggatgttaccgcaaaatacgaattgattgggttgatggcctatcctatccgccacagtttatcgcccgaaatgcagaataaagccttagaaaaagcgggattgccatttacctatatggccttcgaagtggataacgatagctttcctggagcaattgaaggattaaaagccctcaaaatgcgcggaactggtgtatcgatgccgaacaaacaactggcgtgtgaatatgttgatgaattaacaccagctgccaaactggtgggggccatcaacaccatcgttaatgatgatggctatctgcgtggctataacaccgacggcacgggccatattcgcgccattaaagagagcggttttgatatcaaaggcaaaacgatggtgctgttaggggccggtggtgcctcaacggcaattggcgcgcagggggcaattgaaggtttaaaagaaattaaactctttaaccgtcgggatgagttcttcgataaagccctcgccttcgcgcagcgggttaatgaaaacaccgattgtgtcgtcacggtcaccgatctcgccgatcagcaagcctttgctgaagccctggcttccgccgacattttaaccaatggcacaaaagtgggtatgaaaccccttgagaatgaatcattggttaatgatatcagtctgttacatccgggacttctggtcactgaatgcgtgtataacccgcatatgacgaagttattgcagcaggcgcaacaagctggttgcaaaacgattgatggatacggcatgttgttgtggcaaggggctgaacagttcacattatggactggcaaagatttccctctggaatatgttaaacaggtcatggggttcggtgcctgacaggctgaccgcgtgcagaaagggtaaaaaatgaaaaccgtaactgtaaaagatctcgtcattggtacgggcgcacctaaaatcatcgtctcgctgatggcgaaagatatcgccagcgtgaaatccgaagctctcgcctatcgtgaagcggactttgatattctggaatggcgtgtggaccactatgccgacctctccaatgtggagtctgtcatggcggcagcaaaaattctccgtgagaccatgccagaaaaaccgctgctgtttaccttccgcagtgccaaagaaggcggcgagcaggcgatttccaccgaggcttatattgcactcaatcgtgcagccatcgacagcggcctggttgatatgatcgatctggagttatttaccggtgatgatcaggttaaagaaaccgtcgcctacgcccacgcgcatgatgtgaaagtagtcatgtccaaccatgacttccataaaacgccggaagccgaagaaatcattgcccgtctgcgcaaaatgcaatccttcgacgccgatattcctaagattgcgctgatgccgcaaagtaccagcgatgtgctgacgttgcttgccgcgaccctggagatgcaggagcagtatgccgatcgtccaattatcacgatgtcgatggcaaaaactggcgtaatttctcgtctggctggtgaagtatttggctcggcggcaacttttggtgcggtaaaaaaagcgtctgcgccagggcaaatctcggtaaatgatttgcgcacggtattaactattttacaccaggcataagcaataatatttcggcgggaacaccctccccgccgaactaaaaaatatattcaatcgtatttaataaaaatatttcgtgagtctctgtgcgctaattctccatttggcgtagggaaaatcacatctgaatcaggaattaacaatgaaacctgtaaaaccacctcgtattaatggacgagtgccggtcctgtcggcacaggaagcggtgaattatattcccgacgaagcaacactttgtgtgttaggcgctggcggcggtattctggaagccaccacgttaattactgctcttgctgataaatataaacagactcaaacaccacgtaatttatcgattattagtccaacagggcttggcgatcgcgccgaccgtggtattagtcctctggcgcaagaaggtctggtgaaatgggcattatgtggtcactggggacaatcgccgcgtatttctgaactcgcagaacaaaataaaattattgcttataactacccacaaggtgtacttacacaaaccttacgcgccgccgcagcccaccagcctggtattattagtgatattggcatcgggacatttgtcgatccacgccagcaaggcggcaaactgaatgaagtcactaaagaagacctgattaaactggtcgagtttgataacaaagaatatctctattacaaagcgattgcgccagatattgccttcattcgcgctaccacctgcgacagtgaaggctacgccacttttgaagatgaggtgatgtatctcgacgcattggttattgcccaggcggtgcacaataacggcggtattgtgatgatgcaggtgcagaaaatggttaagaaagccacgctgcatcctaaatctgtccgtattccgggttatctggtggatattgtggtggtcgatccggatcaaacccaactgtatggcggtgcaccggttaaccgctttatttctggtgacttcacccttgatgacagtaccaaacttagcctgcccctaaaccaacgtaaattagttgcgcggcgcgcattattcgaaatgcgtaaaggcgcggtggggaatgtcggcgtcggtattgctgacggcattggcctggtcgcccgagaagaaggttgtgctgatgactttattctgacggtagaaacaggtccgattggcggaattacttcacaggggatcgcctttggcgcgaacgtgaatacccgtgccattctggatatgacgtcccagtttgatttttatcacggtggcggtctggatgtttgttatttgagttttgctgaagtcgaccagcacggtaacgtcggcgtgcataaattcaatggtaaaatcatgggcaccggtggatttattgatatcagtgccacttcgaagaaaatcattttctgcggcacattaactgcgggcagtttaaaaacagaaattaccgacggcaaattaaatatcgtccaggaaggacgggtgaagaaatttattcgggaactaccggaaattactttcagcggaaaaatcgctctcgagcgagggctggatgttcgttatatcactgagcgcgcagtattcacgctgaaagaagacggcctgcatttaatcgaaatcgcccctggcgtcgatttacaaaaagatattctcgacaaaatggatttcaccccagtgatttcgccagaactcaaactgatggacgaaagattatttatcgatgcggcgatgggttttgtcctgcctgaagcggctcattaacaggagtataatgatggatttttctttaactgaagaacaagaactgctgctggccagtattcgcgaactgattacgactaactttccggaagagtatttccgcacctgcgatcaaaacgggacatatccgcgtgagtttatgcgggcgctggcggataacggtatttccatgcttggcgtgccggaagaatttggtggtatccctgcggattacgtcacccaaatgctggcgctgatggaagtgtcaaaatgcggtgctccggcatttttaattaccaacggtcaatgtattcacagtatgcgccgtttcggttctgcagagcagctacgtaaaacggcagagagcaccctggaaacgggtgatcccgcctatgccctggcgttgacggaaccaggtgctggctcagataacaacagtgccactaccacttacacgcgtaaaaacggcaaggtctacatcaacggacaaaaaacctttattaccggtgcgaaagagtacccgtatatgctggtgctggcgcgcgatccgcaaccgaaagatcccaaaaaagccttcaccctgtggtgggtcgactccagtaagcccggcattaagattaacccgctgcataaaatcggctggcatatgctcagcacctgcgaagtctatctcgacaacgtggaggttgaagagagcgacatggtgggcgaagaaggaatgggtttcctcaatgtgatgtacaactttgagatggagcgcctgatcaacgccgcgcgcagcaccggctttgccgaatgcgcctttgaagatgccgcccgctatgccaaccaacgtatcgcttttggtaagcccattggtcataaccagatgatccaggaaaaactggcgctgatggcgattaagatcgacaacatgcgcaacatggtgctgaaagtggcatggcaagccgatcagcatcagtcactgcgcaccagcgcggcgctggcaaaactgtactgtgcacgtaccgcaatggaagtcattgatgatgcgattcaaatcatgggcggtctgggctataccgatgaggcgcgcgtctcccgcttctggcgtgatgtccgttgtgaacgtatcggcggcggtacagacgaaattatgatttacgtagcaggtcggcagatcctgaaagactatcagaacaaataatctgcaggcggcgcagcttcttaacaaactgcgccgccagatttatccaacaagacttaccggttgaggaaattcagataggatttcttgttccgcaaaacagtttttaaattgtctacggtaatcgctgggcgaacaaccgacatggcgcaaaaacagtttggcaaagtgatcgacattttcataacccacacgccaggagatctctgcctgtgataattcagtattagtgagtgaccattttgcttccgtcatacgccgttgaataacatagttaataggggaaatacgatactctttggtaaattcatggcaaatataactgacgctggcacgaaattttttcgataactgttctaaagtgattttttcgcgataattattattcagatagaaaagaatatcttttatcagaacatcttttttaatatacccctgctccgaacgataagcatttttaaaattttcgtagtaaagaatggctaacgtataggcaaatgcatcccataacgaagatgtttggctatttttactttgcggcaaaatcacacttagctcattaaataaggtttttatgacttcttttccctgccccgcggcaattaccggacaagaatgcggttgcagtagctgattttcctcagccccctgaaactgaaagccgtacagcgcacaggtacacgtcgttgccggatcgttaacgtcagaggccaccgcatgcagcctgccgcgttctatcaccacaatgtcatccgcatgtgcgacatataacgaagaatcgatggtaaaccttgcaacccctttcttgacgtaaatcaactcggtttcattgtcatgaacgtgatgtccggactcccattttggatcatcgctaaatgcaaaacgtgaaagccgtggcgttttaccggcgacaaacagcgtttcactggcgttatcaaaacagcgttgatacatgacaacctccctattccatgagcaagcaaaaacaatatatgccggataaaatacggcgtgtattgcggttatacaaccgcgtttagcgagagctaaacaagattatttacactgaatgcaagattgtacggtcatggaataactatattgccgcaaattgcacttttgttttagcgatcgcattttttttgcaagattgttggcaaggaaaacagcttgctccgtcgaaaaccccgcaccgctatcgcacactattttcaggccatttttaccttccatcggagatggttccgtatgcgactcacaggagaaatcatgaaaataataacctgctttaagctggtgcctgaagaacaggacattgttgtcactccagaatacaccctgaatttcgacaatgccgacgccaaaatcagccagttcgatctcaatgccattgaagctgcaagccagctcgcaacagatgacgatgagatagccgcgctgaccgttggcggctcattgttgcagaactcgaaagtgcgcaaagacgtgctatcccgcgggccgcacagcctgtatttggtgcaggatgcgcaacttgaacatgcactgcctctcgataccgcaaaagcgctggcggcagcaattgaaaagatcggcttcgatttactgatctttggtgaaggttccggcgacctttatgcccagcaggttggcttgctggtcggagaaattctgcaacttccggtgattaatgcagtgagtgctattcagcgtcagggcaatacactggtgattgaacgcacgcttgaagatgatgttgaagttattgaactctctgttccagccgtgctctgcgtcacctccgatattaacgtgccacgcattccttcgatgaaagccattctcggcgcgggtaaaaaaccggtaaatcagtggcaggcaagtgatattgactggagccagagcgcgccacttgctgaactggtcggcattcgcgtaccgccgcaaacagaacgtaagcacatcattatcgataacgattcgccggaggccattgccgagctggcggaacatctgaagaaagccctgaactgaagcctacggagaagaaacgatgagtcaattaaacagcgtctgggtctttagcgataatcctgaacgttatgctgaactgtttggcggcgctcagcaatggggccaacaggtgtatgccattgtacaaaataccgaccaggcgcaggcagttatgccttatggtccaaaatgtctttatgttcttgcgcaaaacgacgcgctgcaacgcactgaaaattacgccgaaagcattgctgccctgctgaaagataaacaccccgctatgttgctgttggccgcgacgaaacgtggtaaagcgctggcagcacggttaagtgtgcaactgaatgcggcgctggtgaacgatgccacggcggtggatattgtcgatggtcacatttgcgccgaacaccggatgtatggcgggttagcgttcgctcaggaaaagatcaacagcccgctggcgatcattacccttgcacccggtgttcaggaaccgtgcaccagtgatacctctcatcagtgcccgacagaaacggtaccttatgttgctccgcgtcatgaaattctctgtcgcgaacgccgtgcgaaagccgcaagcagcgtggacctgagcaaagcaaaacgtgtggttggcgtcggtcgtggactggcggcgcaggatgacctaaaaatggtccacgaactggcggcggtgctgaatgctgaagtcggctgttcacgtccaattgccgaaggcgagaactggatggagcgtgaacgttatatcggtgtctccggcgtgttgctgaaatccgatctctacctgacgctggggatctccgggcagatccagcatatggttggcggcaacggcgcaaaagtgattgtcgccatcaataaagataaaaatgcgccaatcttcaactatgccgactacggtctggtgggcgatatctacaaagtcgtccctgccctgattagccagttgagccgctaattcccctttcaaccacatctcccgctgtaaacgcagcgggaagggagcataacgcatgtcggatgacaaatttgatgccattgtggtcggtgcgggcgttgctggtagcgttgccgcactggtcatggcacgagccgggctggatgtcctggtgatagaacgcggcgacagtgccggatgtaaaaacatgaccggcgggcgtctttatgcccacacacttgaagcaatcattccaggctttgcagtatcagcgccggtagaacgcaaggtcacacgcgagaaaatctccttcttaaccgaagaaagcgccgttaccctcgattttcaccgcgagcagccagatgttccgcaacacgcatcttataccgtattgcgtaatcgtctggacccgtggttgatggaacaagccgagcaggcgggcgcgcagtttatcccaggcgttcgcgtcgacgcgctggttcgtgaaggaaacaaggtcactggcgtgcaggctggggatgatattctcgaagcgaatgtggtgattctggctgatggcgttaactcgatgcttggccgctcgctgggaatggttcccgcttccgatccgcatcattacgctgttggtgttaaagaggttattggcctcacaccagaacagatcaacgatcgctttaatattacgggcgaggaaggtgccgcctggctgtttgccggttccccttctgacggcctgatgggcgggggatttctctataccaacaaggattccatatccttggggctggtttgtggattgggtgatatcgcccatgcgcaaaaaagcgtgccgcaaatgctggaagattttaaacaacaccccgccattcgcccgctgattagcggcggcaaactgcttgaatattccgcgcatatggtgccggaaggcggtctggcaatggtgccgcaactggttaacgagggcgtgatgatcgttggtgacgccgcaggcttctgcctgaatttgggttttacggtccgcggcatggatttagccattgcatcggctcaggctgccgccacaacggtgatcgccgccaaagaacgcgcggatttctccgccagcagtctggcgcaatacaaacgtgagctggaacaaagctgcgtcatgcgtgatatgcagcattttcgcaagatcccggcgctgatggaaaacccgcgcctgtttagccaatacccacgaatggtagccgacatcatgaacgagatgttcaccatcgacggcaaaccaaaccagccggtacgaaaaatgatcatgggacatgcgaagaaaattgggctgatcaacttgctgaaagatggcattaagggagcaaccgcgctatgagccagaacgctacggttaacgtcgacatcaaattaggcgtcaataaattccatgttgatgagggccacccgcatatcattctggcggaaaatcccgatatcaatgaattccataaattaatgaaagcctgccctgccggactttataagcaggatgacgcaggaaacattcattttgattccgccggttgtctggagtgcggcacctgtcgggtgctgtgcggtaacactattctcgaacagtggcaatatcccgcaggcaccttcggtattgattttcgctacggctaatcatgcatcccacaggcccgcatctcgggcctgatgttctgtttcgagagtccaacatgaaagtgacattaacgtttaacgaacaacgtcgtgcggcgtatcgtcagcaagggttatggggcgatgcttcgctggccgattactggcagcagaccgctcgtgcgatgccagacaaaattgccgtggtcgataatcatggtgcatcgtacacctatagcgcgctcgatcacgccgcgagctgtctggcaaactggatgttagcgaagggtattgaatcaggcgatcgcatcgcatttcaactgcctggctggtgtgaatttaccgttatctatcttgcctgcctgaaaatcggtgcagtttccgtgccgctgttgccttcctggcgggaagcagaactggtgtgggtgctcaataagtgtcaggcaaaaatgttctttgcaccgacgttgtttaaacaaacgcgtccggtagatttaatcctgccgctgcaaaatcagcttccacaactacaacaaattgtcggcgtggacaaactggctcccgccacctcttccctctcattaagtcagattatcgccgacaatacctcactgaccacggcgataacgacccacggcgatgaattagctgcggtgctgtttacctccggaaccgagggtctgccaaagggcgtgatgctaacgcataacaatattctcgccagtgagcgggcttattgcgcgcgactgaatctgacctggcaggatgtctttatgatgcctgcgccacttggtcacgcaacgggctttctgcatggcgtaacggcaccattcttaattggcgctcgcagcgtgttgttagatattttcactcctgatgcgtgtctcgcgctgcttgagcagcagcgttgcacctgtatgctcggcgcaacgccgtttgtctatgatcttttgaatgtactagagaaacaacccgcggacctttcagcgctgcgtttctttctttgcggcggaaccacaatccccaaaaaagtggcgcgtgaatgccagcagcgcggcattaaattattaagtgtttatggttccacagaaagttcgccgcatgcggtggtgaatctcgatgatcctttgtcgcgctttatgcacaccgatggttacgctgccgcaggtgtagagattaaagtggtcgatgacgcacgcaagaccttaccgccaggttgcgaaggtgaagaagcctcgcgtggccccaatgtgtttatggggtattttgatgaacctgaattaaccgcccgtgccctggatgaagaaggctggtattacagcggcgatctctgccgtatggatgaggctggctatataaaaattaccggacgcaaaaaagatattattgtccgcggcggcgaaaatattagcagccgtgaagtggaagatattttattgcagcatcctaaaattcacgatgcctgtgtggttgcaatgtccgatgaacgtttaggtgaacgatcatgcgcttatgtcgtgctgaaagcgccgcatcattcattatcgctggaagaggtagtggctttttttagccgtaaacgggtcgcaaaatataaatatcctgaacatatcgtggtaatcgaaaaactaccgcgaactacctcaggtaaaatacaaaagtttttgttaagaaaagatattatgcggcgtttaacgcaggatgtctgtgaagagattgaataagtttcatcttcggggatcacataaccccggcgactaaacgccgccggggatttattttatttcttcagttcagccaggcttaaccaggtttgcaccacggtgtccgggttcagagacaggctatcgatcccctcttccatcaaccatgcggcaaagtcttcgtggtcggacggaccctgaccgcaaatcccgacatatttgccctgtttcttcgcggcacggatagccatcgacagcagtgctttcaccgcatcgttgcgctcatcgaacaattcagacaccacgccggagtcacggtccagaccgagcgccagctgcgtcatatcgtttgagccaattgagaagccgtcgaaatattcgaggaactgctcggccagcaaggcgttggacgggatttcacacatcatgatgattttcagcccgttctcgccacgtttcagcccctgacgcgccagttcttcaaccaccgctttcgcctgatctacggtacgcacgaacgggatcatgatctcaacgttggtcagtcccatgtcgttgcgcacacgtttcactgcttcacactccagcgcgaaacagtcgcggaagctgtcggaaacatagcggcccgcgccacggaagccgagcatcgggttctcttcatctggctcgtaacgctcaccaccgaccaggttggcatattcgttcgatttaaaatcagagagacggacaatgacgcgcttcggataaaacgcggcacccagcgtcgcgatcccttcagtcagacgaccaacgtaaaattcacgcggagaatcaaaacctttcatcatctcgcggatttcgttttgcaactgcggttcctgatcgtcaaactcaagcagtgcgcgtgggtggacgccaatcatacggttgatgataaattccagacgcgcaaggcccacgccttcgttcggtaggcaggcgaagtcgaaagcacggtccgggttaccgacgttcatcatcactttcaacggcagatccggcatcgtttctacgctggagcttttcacgctaaattccagcaactccgcatagacgtaaccggtatcaccttcggcacaagaaacagtgacgttctcaccgtctttcatccgttctgttgcatctccacagcccactaccgccggaatgcccagttcacgagcgatgatcgccgcgtgacaggtacgaccgccacggttggtgacgatggcagatgctttcttcatgatcggttcccagtccgggtcggtcatgtcagtaaccagcacgtcgccaggttcgatgcggttcatttcgctgatgtcatggatgactttcaccggacccgcaccgatgcgatgaccgatagcacggccttcggcgataatcttaccctgtgaatgcagcgtataacgctccatgacctgaccgcgtgagcgcacggtttccggacgcgcctgcacaatgaacagtttaccggtgtggccatctttcgcccactcaatatccatcgggcgaccgtagtgtttctcaatttgtacggcctgttttgccagttcctgcacttcttcgttggtcagcgagaagatgtcacgctgttcctgcggtacgtcttcgattttaacctgcttgccgtgctcctgggtcggcgcgtaaaccatgcggatttttttcgaccccatggtgcggcgcacgatagccgggcgattcgccgccagtgtcggtttatgcacgtaaaactcatccgggttaaccgcaccctgcacgaccatctcaccaaggccccatgcggaagtgataaacaccacctggtcaaagccggattcggtatcaatggagaacatcacgccagatgatgcgaggtcagagcgcaccatccgttgaacaccggcggagagcgccacaccacggtgatcgtaaccctggtgcacacgataagagatggcgcgatcgttaaacagagaagcaaatacatgtttcactgccacgagaacggcgtcaaaaccctgaacgttgaggaaggtttcctgctgaccggcaaaagaagcgtccggcatatcttctgcggtggcggaggagcgcaccgcaaaagaggcgttttcgtcatcggcggaaagctgtgcataggcttcgcggatggcgttttccagctcaggctggaagggagtgtcgataatccactggcggatttgcgcgcccgctttcgcaagctgagtaacatcgtcaatatccgttttatccagcagttcataaatgcgctggtttacgccgctttggtccagaaactggttaaacgcgtcggcggttgtggcgaaaccattcggaacggaaacacccattccggaaagattagtaatcatttcacccagggaggcatttttgcccccaaccctgtctacatcattcatgccgagttggttataccaaagcaccagcggtgacgagccattgttggacatcgaacaatccttttgtgataaatgaacggtttgagaaacacatttctgcgcatttatctttgcatatttaaccggatgaaaaaaacggtgaatcgttcaagcaaatatatttttttactttttaagactgatcccagcgttgcgcaaatctgctctcttcgacaatttccacataaaccatcggtataaacgaaaccataaaaatgaaatgctgttttcataaaaaataaaattgaaggttcattttataaaccagacataacgttctacgcttctgtgcgtttttaatttatgctttcatagaattatgtctgcatcacgggaagaacaaaatggataatgctgttgatcgccacgttttttatatttctgatggtacggcaataactgcggaggtattaggacacgcagtaatgtcacaatttcccgtcactatcagcagcatcacgctgccgtttgtcgaaaatgagagccgtgcacgggcagtgaaggatcagattgacgcaatttatcaccagacaggcgtgcgcccgctggtcttctactccatcgtgttgccggagattcgcgccatcatcttgcaaagtgaaggcttttgccaggatatcgttcaggcgctggttgccccgctacaacaagagatgaaactggatccaacgccgattgctcatcgtacccatggccttaaccctaataatctcaataaatatgatgcgcgcattgcggcgattgattacaccctcgcccacgatgacggcatttcgttgcgcaatctggaccaggctcaggtgatcctgctcggtgtttctcgctgtggtaaaacccccaccagtctgtatctggcaatgcagtttggtatccgcgcggcaaactacccctttattgccgacgatatggataatctggtgctacccgcgtcgctcaaaccgcttcagcataaattgttcggcctgactatcgacccggaacgtctggcggcgattcgcgaggaacgtcgggagaacagtcgctatgcctcgcttcgtcagtgcaggatggaagtcgcggaagtggaagccttgtaccgtaaaaatcagatcccgtggattaacagtaccaattattcggtagaagagattgccaccaagatcctcgatatcatgggccttagtcgccgaatgtactagagaactagtgcattagcttatttttttgttatcatgctaaccacccggcgaggtgtgacacacctcgcacttgaaatcagcagcgattggtttatcgtgatgcgcatcacttcccggcagtcctgccgtagaagcaacaaatttctgagacttgtaatgaacagaactgacgaactccgtactgcgcgtattgagagcctggtaacgcccgccgaactcgcgctacggtatcccgtaacgcctggcgtcgccacccatgtcaccgactcccgccgcagaattgaaaaaatactgaatggtgaagataagcgactgttggtcattattggcccctgctcgatccacgatctcaccgctgcaatggagtacgccacccgtctgcagtcgctgcgcaaccagtaccagtcacggctggaaatcgtaatgcgcacctattttgaaaaaccacgaactgttgtcggctggaaaggactaatctccgatccagatttaaacggcagctatcgggtaaatcacggtctggagctggcgcgcaaattacttttacaggtaaatgagctgggcgtcccaaccgcgaccgagttcctcgatatggtgaccggtcagtttattgctgatttaatcagttggggcgcgattggcgcacgtactaccgaaagtcagatccaccgcgaaatggcttcggcactctcctgtccggtaggttttaaaaatggtaccgatggcaatacgcggattgctgtggatgctatccgcgcagcccgcgccagccatatgttcctctcgccagacaaaaatggtcagatgaccatctatcagaccagcggcaacccgtatggccacattattatgcgtggcggcaaaaaaccgaattatcatgccgatgatatcgccgcagcctgcgatacgctgcacgagtttgatttacctgaacatctggtggtggatttcagccacggtaactgccagaagcagcaccgtcgccagttagaagtttgtgaggatatttgtcagcaaatccgcaatggctctacggcgattgctggaattatggcggaaagtttcctgcgcgaaggaacgcaaaaaatcgtcggcagtcagccgctcacttacggtcaatccattaccgacccgtgtctgggctgggaggataccgaacgcctggtcgaaaaactcgcctctgcggtagatacccgcttctgaatgcgtgcccattcctgacggaatgggcatttctgcgcaacttgttgtcttctcaacaaattactgcttgctctggtcagccataatattgataataagaatcattgttatatcaattattattaatttttatgcgttatacggatagcagaaaactcacgcctgaaacggatgccaatcacaagaccgcttccccgcagcctattcggcgaatttccagccagacactgttaggtccggatggcaaactgattatcgatcatgacgggcaagaatatctgctccgtaaaactcaggctggcaagctgctgttgaccaagtagcctttaactcgagcagctgacttccagccgtttaccccagtcaggtggacgactgacatagtcatcatctctgtcgctgaaaggatttcgcaacgcctcatgcaggcggtgcaattccgtcatatcacccttttctgccgcttcaatcgcccgttgcgccaaccagttgcgcaataccagagcggggttaacgctttgcatcagttgctgacgctcactatcgctaacctcgtcttgttgcaaacgcccccgataacgggcaaaccagtcatcaaatgccgcacgatcaataaactcatcacgtagcggtgacgccgcgctgtgctgctcggtcagactcagcatgcggaatgtgcgggtataatcgctgcgctctcgcgccatcagactgaataattcattcagtagcgcgttatcctctttttgctccgtcatgaagcccagtttctgccgcatccgttctccataatgcgtcaacaaaacctgctgatagctgtccagggcctcattcagggcatctacggcaacaaatggcgacaatgtctgcgccagacgctgtaaattccacaacgcgacggcaggttgattatcaaagctgtaacgcccttgatgatccgagtgattacaaataaaaccgggttcgtaatcatcaagaaaaccaaacggcccgtaatcaagcgtcagccccagcagcgacatgttgtcggtattcatcaccccatgagcaaagccgaccgtctgccattgggcaattaacgacgcggtacgtgcgacaacatcgctaaaccagagacggtatttgtcctcatcatctgcaagatgtgaccagtaatgacgaatagcaaagtcagctaactgacgaaccttttccgactcgcggcggtagtaaaaatgttcgaaatgaccaaagcgcagatgacttggtgccacacgcatcagcatcgcgcctggctccgccgtttcccgatacactggcgaatcgctggtgacgatacttaacgcgcgggtcgtcggaatgcccagataatgcatcgcctcactggcgagactttctcgtatcgtcgaacgtaaaaccgcccgtccatcacccattcgcgaataaggcgtcaggccagcacctttcagatgccagtccattgtagtgccatcagcaagcagttgttcgccgagtaaaatgccgcgcccatcacccagttggcccgcccagacgccgaactgatgaccactgtaaacctgcgccagtggtgacataccaggcagtagggcttcgccgccccagacacctgcgccatttttaaacagcgacgatggaatactcagcgtgttagccagttcggtattatgccaaatcagccgggcattatttaaaggcgtaggggaaagtgctgtataggtttctggcaattcatcgcgccagcgggtaacaaaagacagggtcatagatcctcctgtttgatagtgtagacggttactctcgtcttaaacaccagcaaacagaagggttatcgctgaaccaacgtcgttatctgatttatgggaacggcaggccacaggcatccctggagagcatggaaatcgaagggggtaatctgtgccaatatttctgccgtatcaatgcctcccgcaatgatgcaattgcaacaaggggaaatttgcgcctggatcgcacgaataaacggttcgaaggagcggtgcgtgatttgttgctgaataaaacttttatccagcatgacgcgggtgaaaagaccatcaaaaaccgctttcattgtgctattgcctgctcccaaattacctaacacaaggggatacacttgcgataaggataaaagaccgcgattatcttttccttcattgagatgcgggtaattctcattaatcaacagttcaataaacggatattttaatagttcgcctgcgtaattatccctctctaataataatgtagccacttgtggcgttaaattaagccaggcaaagagtttatgttgaataaaaaaatgttggcatgattttagtaattccaactgctctgaaaataattgccaatgttgctcctcggtaagttgcgctataacccgactcgtcgggatacgaaccgtaccatcttcactggagaaatgggtaattaactcaacgccgacaaggacttgctggttgtctcttatcggcaggaaatagcaatcagaatgataaagattctccaaaaaaatcttcatggtaaccgtccctctcgaaggatgtttttcagtatccggctaaaagggatgaggccataagacataacaattacagaaggagtaactttcatttgttccatgttaaccactttttcaggggtcctttttttagattatcctgattataaacgaataatccatttacggaatttttgtctgcaaaatactactgtattcaggagtaaatggacggcgatgtatcatcgccgtccatttttcgacatactagattcgtctcgcctgccagaaatttttctgccaatagacattatcaagtgaggaacgcatcactcccttgctggtagaggcgtggataaattggttgttggtatcgtaaatacctacatgcaaaccattttgtccggaccccgttttgaaaaagaccaggtcacctggcagcaactcgtctttatcaatttgcgtgccaatagaggcttgttgtttggtttcacggggcagctgcaaatcgaaacgatcgcgcatcgtcacaaccacaaatcccgaacagtccacaccgcgccgcgtcatgccaccataacgatacggcgtgccatgccagctttgtagctggtcgttcaaaccggcaataacggtaatcgaatcagaaagtctggcatttggcggcggtgctttatggtggctacacccggccagaagcagtgctgtgatcaaaataaggcagaaacgcattccgtacggttcctctgttttttattcttgcattaatttagcgtcgtaattacccgattttcaagatactaatgaaatcagatggtcgaaatcagcattctgtgaccttcgatatccagacggcgaaaattcatcccataggcctgcgccagatttggcggcgtgagcacctcttccctgcgtccactggccagcatttttccaccttttagcaaccacgcccgatgcgcatgacgcaatgtgtggttgagatcgtgactgctcatcacaatcgccagtccttgctgacacagcgcgctcagaattttgtctaacgcactttgttgcgcaacatcaagactgttcatcggctcatcaagaagcagcaattggcctgcgggattggcttgtggtgtgatttgcaacaccaccgcagcaagacgtacgcgttgccattcaccgccggaaagttgattggtgctacgtccgagtttgtcatcaagagccagcgcccctgcgacatcattcagtagttcggtacgcgttttatcgtgctgatgcagtgtcaggtagtgccagaccggcgttgcaaacggcggcgtctgctgttgtgaaagataggcgcgatgcagcgcgagttttgttgcggaccatgcttccagtggttgccccgcgaactgaatgcttcccttaccgctggtcattccggccattcgcgccagtaaggtactcttacccgcgccattcggccccaccaggtgcaggatctccccagcccgaacctcgccagaaagcggccccaggcgggtagattccgcaacatcttgtaactgcatcacaatagacattattttgccaacgccagtttaatgctttccatcacaatgggatcttccggcgtcatatccggggaaaaacgctggatgacttttccgtccctgccaaccaggaatttttcaaaattccataaaatatcatccgggtacagcggtgcacggcctttgctgaccatacgggcatagaatccgctctcttccggcgcgactgcggtcggcgctgcggcaatcaatttttgatacagcggatggcgtccttcgccattaacttcaatcttactgaacatcgggaacgtcaccccccatgtggtggtacagtaagttttaatctcttcatcgctgcccggttcttgttccagaaactggttgcacgggaatcccagcaccataaaacctcgatcgacccaggctttctgaatattctccaactgctcatattgcggcgttaagccacactttgaggcgacattgacaatcaacagcacattaccggcgaacttctccagcgtggtcacttcaccgtcgatatctttcactacggtcgtcagaatggaatcttgcatcgtttctcctgggtgtggtcagtaaaaatcttagcttttaatcatagaccgtctttttgcggctaacgtcctgcttttaacaataaccagataaacaccggcgcacctaacgttgcggtgaccacgccaataggcagctctgcggcagctaatgccaggcgcgctacaatatcggccagcagcaatgcgctcgcccctgccagcgcgcagccgggaagtaatacgcgatgatcggttaaaccacacaaccggagaatatgggggatcaccagaccaataaagccgatagcacccgccagcgccacactgacgccaaccatccagccggtcgctgccaccagcacattgcgccagaaccacaggggtaaacccagttgccgcgccgagatctcgccaagtgctaacatattcatcggcctggactgacaacagatccacaacaacacggggatcaatgccagcatcagccagctttgccgccagtctacgccgccaaaaccgcccatcatccagtacatcagctgacgcaaatcaactgaggtggaaaagtagatagcccacgtcattagtgcgctacagataatccctaatgcaacgccagccagcaataaccgactggtcgaaagatgacgacgggcgaaacgtaagagtattaaagtgatgataagcgcgccagcaatcgcacacagccctagcgcccagttggggagttgcccttgcccaagcaataccgcggcgataagccccacgcctgcgccgttagagacgccaagtagtccaggttctgccagaggattttcaaacaacgcctgcattacagcgccggatatagccagcgccgcaccaaccagcaatacagccagcgtacgtggcaggcgaatttgccagacgaacagttcgccacgaggagtaaaccagtcacctggcgagatccattgttcaccggcgcaaaggcttaagagaagcgccagcagcatcaaaactgacaggcataataaccagcgaatattttgtcgctgttgttggcgggcaagtgtcagcatggtatccgttctgctgaagtgtcatggcgttgattttacggtgactcttcgacagtgaaaagaaaaaaggccgcagagcggcctttttagttagatcagattactcgtctttgggcgaagcgttttcgacccggctttttaacttctgcccgggtctgaaggtcaccacgcgccgtgctgtaatgggaatatcctcgcccgttttcgggttacgtcccgggcgttgattcttatcacgcagatcgaagttaccaaaaccagagagtttcacctgttcgccgttttccagagcgcgacggatctcttcgaaaaacagttcaaccagttctttggcatcccgcttgctaagcccaagcttatcaaacagatattctgacatttcagcttttgtaagcgccataggttcaatccctcaatgatgcctggaatcgctcttttaatgcctctacacatttggcgacggtagcggcaatctcctcttcttcgagtgtacggctggtatcttgcaggatcaggcttatggcgaggctcttatacccctccgcaacacccttaccgcggtacacgtcaaataagtttacgccaactacctgatttacgccaactttcttacattcggataaaatatccgctgcgggaacgttttctgcgaccaccaccgcgatgtcacgacggttcgccgggaagcgagaaatctcgcgcgcctgaggcaccacgcggtctgcgagcttgttccactccagttcgaacaccagagtgcgaccgttaagatccagtttacgttccagttcaggatgaacaaccccaacaaaaccaatacgttcacctttcagataaatcgctgcggattgccccggatgcagtgccggattcgcttctgcacggaactcaacctcattcagtttaccggtcaggtcgagaacggattcaagatcgcctttcaaatcatagaaatcaacggtctcttttgccaggttccagtgctcttcgtaacggttaccgcaaatcacaccggctaacatcagatcctgacgaatgcccaacggtgcctgagtatctggtacgaaacgcagaccgctttcgaaaatgcgcacacggttctgctgacggttctggttgtacaccacggttgccagcaggccagtccacagagaaagacgcattgctgacatttcaacagagatcgggcttggcagcagtaaggcttcaacgcctggatggatcatctgctgcactttcggatcaacgaagctgtaggtgatcacttcctgatagcctttgtcgttgagcagcgttttcacgcgcttgagcgacaggtcagcttcacggtgagtacccataatcaggcttgcctgtaccggctcatccgggatgttgttgtagccgtaaacacgcgcgacttcttcaaccagatcttcttcaatctccatatcgaaacgccagctcggcgcaactgcctgccattcgtctttgccttcggtcacttcgcagccgagacgacgcagaatgtcagttacctgctcatccgcaatatgatggccgatcaggcgatccagtttgctacgacgtagagtgatggttgcacgcttcggcagcgttgcttcgttggtgatatcaattaccgggccagcctcaccaccgcagatgtcgatcagcagacgggtcgcacgttccatcgctttgtgctgcagtgccggatcaacgccacgctcataacggtgagacgcatcggtatgcaggccatgacgacgagcacgaccggtgatagacagcgggctaaagaacgcgcattccagcagcacgttttgtgtttcgtcattcacgccagagtgttcgccaccgaagatgccgcccatcgccagcgccttgttgtggtcggcgatgaccagagtgtcagcattcagcttcgcttcagtaccgtcgagcagcaccagcgtttcgccctctttcgccatccgcaccacaatgccgccttcaatgcgatctttatcgaaagcgtgcatcggctggcccagttcgagcagcacatagttggtgacgtcaacaactgcatcgatagaacggatcccgcaacgacgcagtttttctttcatccacagcggagttggcgctttaacgttaatgccttttaccacacggccaagataacgcgggcaggcttccggcgcttcgactgtaatcggcagcgtgtcgtcgatggtcgcaccaaccggaacgatttccggttgaaccagcggcagctggttcagcacggcaacgtcacgcgcaacaccaatgatgcctaagcagtcggcacggtttggcgtcacgctgatttcgatggtgttgtcatcaagtttcaggtattcacggatatcggtgccaatcggcgcatccgcaggcagttcgataatgccgctgtgatcgtcagaaatgcccagttcagagaaggagcacagcatcccttcagacggttcgccacgcagtttcgccgctttaattttgaaatcacccggcagaacagcaccaatggtcgctaccgctacacgcaggccctgacggcagtttggcgcaccgcagacgatgtccagcaggcgatcgccgccgacattcacttttgtcacacgcagtttgtcagcgttcggatgctgcgcacactcaaccacttcaccaacgaccacgccgtggaagctgccggcaaccggttctacaccgtcaacttccaggcccgccatagtgatttgatttgccagcgcatcgctatcaatcgccgggttcacccattcgcgtaaccacagttcactgaatttcataatctattcctgccttatttaaactgtttgaggaaacgcagatcgttttcgaagaatgaacgcaggtcggtgacgccgtaacgcaacatagtcagacgctccatccccatcccgaaggcgaaaccagagtaaacttccgggtcgatgccaacgttacgcaacacgttcggatgcaccatcccgcagcccagcacttccagccatttaccgtttttacccatgacgtccacttctgcagaaggttcggtaaacgggaagtaggaaggacggaagcgaatctgcaaatcttcctcaaagaagttacgcaggaagtcgtgcagcgtgcctttcaggttggtaaagctgatgttggtatcaacaatcagaccttccatctgatggaacatcggcgtgtgagtctggtcgtagtcgttacgataaacacggccaggcgcgatgatacgaatcggtggctgctgggctttcatggtgcggatctgtacgccagaggtctgggtacgcagcaggcgggtagtgtcaaaccagaaagtgtcgtggtcagcgcgcgccgggtggtgaccaggaatgttcagagcatcgaagttatgataatcgtcttcgatttccggcccggttgccacggtaaagccaagctcaccgaagaaactttcgatacggtcgatggtacgggtaaccggatgcagaccgccgttttcaatgcgacgacctggcagagagacatcaatcgtttccgccgccagacgcgcattcagtgcagcgctttccagttccgctttacgcgcattcagcgcctgctgaacctgctctttcgcttcgttgataaccgcaccagctgccggacgctcttctggcggcagctcacgcagggtcgtcatctgaagggttaagtgcccttttttacccaaatattcgacgcgcacattatctaacgcggcaacatctgacgcctggctaatggccgccttcgcactggcaaccagttctgcgagatgtgacatggttttcctcattgtgtcagtggtgacactggttcgttggacttagagcctatcccatcaggctattttacttgccattttggtcccgggctgtgctcgaaattctcacgtacttaaatacgctccggtttctccgcgctggccgtgtccagtctggctgcgacaattacacctgatgagacaggctttttatttttcaaaacgcgcatacaaaaaaagcctccactgggaggctttcaggcgctgttttccgtttctcttctcacgcgctagcctcctggattcaggtgctaaagtaaaaaaagaagcggaaaatagcagcattcattgcttgcgttaccttttggtactcttcaaaagacctttattgaaaaggctacggcgataaaagtcaatgttttgatggcgttgaaacgaaaagagggagactagctccctctttcaactggcttatgccagagctgctttcgctttttcaaccagagcggtgaacgctactttgtcgaatactgcgatatcagccaggatcttacggtcgatttcaacagaggcttttttcaggccattgatgaatttgctgtaagaaataccgttctgacgtgctgctgcgttgatacgcgcaatccacagttgacggaactgacgcttacgttgacgacggtcacggtaagcatactgaccagctttgataacagcctggaaggcaacgcggtatacgcgagaacgcgcaccgtagtagcctttagcttgtttcaaaattttcttgtgacgtgcacgtgcaataacaccacgttttacgcgagccatatgtgctctcctgtatctatattctaattaaaaagttaaaaacgttaacggcttatgcgtacggcaggcacgcgattaccaggcccagatcgcctttggaaaccatggctttcggacgcaggtgacgtttacgtttggtcgcttttttggtcagaatgtgacgcaggttagcgtgcttgtgcttaaaaccacctttaccggtttttttgaagcgcttagcagcaccgcgtacggtcttaatttttggcattttaataacttccacttcgcattgttaataaacgaaacaaaggcgaacaaagcctgtgaagcccgaaggctccacagacagtgctacttgaaggccttactgtttcttcttaggagcgagcaccatgatcatctggcggccttcgatcttcgttgggaaggattcgaccactgccagttcttgcaaatcgtctttcacgcgattaagcacttccataccgatttgctggtgcgccatctcacgaccgcggaaacgcagcgtgattttggctttatcaccctcttcgagaaagcgaatcaggctgcggagttttacctgatagtcgccttcatctgtaccaggacggaatttaatttccttaacctggataactttttgctttttcttctgttccttagaagacttgctcttttcatagaggaatttgccgtaatccattatacgacaaaccggcggctcggcgttagggctgatctcgactaagtctactccggcttcttctgctttctccagagcttctctcagactcacaataccaagctgctcgccttccagacctgttaagcgaacttcctgggcgcgaatttcgccattgatacggttagggcgcgccgtttgaactcgttttccgcctttaataccttattcctccaattgtttaagactgcggctgcgaatctcttgttgcagcttctcgatcacttcatttacgtccatgcttcccaggtctttaccacggcgggtgcgaacggcaactttgcctgattccacctctttatcaccacagaccagcatatatgggacgcgacgcaaagtgtgctcgcggattttaaagccaatcttctcatttctcaagtctgctttaacacgaatgcccgcatttgatagtttttgcgtcaattcgttaacgtattcagactgtgaatcggtaatattcatgataacaacctgaaccggcgcaagccaggtcgggaagaaaccagcgaactcttcggtcaggataccgatgaaacgttccatcgaccccagaattgcgcggtgaatcattaccggtactttacgttcattgtcttcgcctacataagaagcgctcagacgagacggcaaagagaagtccagctgtactgtaccgcactgccatgcacgatcgaggcagtcatacagggtaaattcaattttcggaccgtagaaagcgccttcacccagttgatattcaaacgggatgttgttttcttccagcgcaaccgccaggtccgcctcagcacgatcccacatttcgtcgctgccaatacgtttttcaggacgagtggagagtttgacgacgatcttctcgaagccaaaagtgctgtacatatcatagactaaacggatacatccgttaacttcatcgcgaatttgttcttcagtacagaagatatgcgcgtcatcctgggtaaatccacgcacgcgcatcaggccatgcagcgaacctgacggctcgttacggtggcagctaccaaactcggccatacgcagcggcagatcgcgataagacttcagcccctggttgaaaatttgtacgtgacccgggcagttcatcggcttaatgcagtattcacggttctcagaagatgtggtgaacattgcatctttgtagttgtcccagtgaccggttttttcccacaggacacggtccatcatgaacggacctttaacttcctgatactggtactctttcagtttagaacgaacaaacacttccagttcacggaagatggtccagccgtcgttgtgccagaataccatacccggcgcttcttcctgcatatggtacaggtcgagctgtttaccgattttacggtggtcgcgtttcgcggcttcttccaggcgctgcaggtaagcgttaagtgcttttttgtctgcccacgccgtaccgtaaatacgttgcaacattttgttgttgctgtcgccacgccagtaagcccctgccgttttcattagtttgaaatgatggcagaaacgcatgttcggtacgtgcggaccgcggcacatatcgacatattcttcatggaagtacagacctggcttgtcatcatgggcgatgttttcgtcaagaatggagactttgtagctctccccacggttggcgaaagtttcacgcgcttcgtgccagctgactttcttcttaatgacgtcgtagtttttctcagcaagctcatgcatccgcttctcgagtgcttcgacatcttcctgggttaacgtgcggtcaagatcaacgtcgtaataaaaaccgttgtcaataaccgggccgattgccattttggtatgcggccaaagttgtttaatcgcgtgccctaacaggtgcgcacaggagtgacgaatgatctccagaccttcttcgtctttggcggtaatgatcgacagttgtgcgtcgttttcaatcagatcgcaagcatcaaccagttcgccattaacgcgccctgcgatacaggctttcgccagacctggaccaatgtccagcgcaacatccatggggcttacagcgtgatcgtaatggcgttggctgccatcaggaagagttataacaggcattttatatccttatttgcagtggtgacccacacgaaagatcacatacaaagaaaaatttgtttattaacagttcattgcgaaaccatctagccaacaaatgctaaattggttcgcaatcaggtacacaaatgaaagacattaacctctcaccttccacccggttgagcgatgttaacactaaaaaaagggagattgtacctttccgtttcacattgattcgattcgcaattcgtttgtagtgagtacaccagcaaaacgcttaaagaacaactgataacatcacggtgcgtctgaaaggtttactgcgagcggatttacagcagcataaactgaatccagcaaagttcgttgcgtgatttggcggtagtattttaaacgctcatgagattaatgacgaagtggtcatatcacaatgataaaagtgacacaattcttataacaatttttcgtgcacatttcgttctggcgataataattaatcatcatcctcaaaacctccagatatatataaggcgaacagattatgagtcaaaacgatatcattatcagaactcattataagtctcctcatagattgcacatcgatagcgacataccaacaccttcatcagagcctattaatcaatttgcgcgccagctcatcaccctacttgatacctctgacttaagttcgatgctgtcatactgtgttactcaggaatttaccgcaaactgtcgaaaaatatcacaaaattgttattccactgccctttttaccattaactttgccacttcacccatccatacagaaaatatactcattacattacactataaaaaagaaatcatttccttattactggaaaccacgcctattaaagctaaccatttgcgaagcatactggattatattgaacaggaacagttaactgctgaagatcgtaaccattgtatgaaactgtctaaaaaaatccatagagaaaaaaactatacacccaacagtaaatctcaatggtagtgcatgttttttgcaatctccttctgacgctattttttgtcgccatctgtcattgcaatacgcccttgattcattgagaaatggaaaaggcaaagtcaacctgattaaacattactcctccgttgaatccatacagcagcatgtccccttagtccgggacgcggagttcagagcattacttcgccatcctcctgcagggagtcgcgttatcgcgagtaaggattttggcttcgctttagatattttcttttgtcgaatgatggcaaacaatgtcagtcatatgtccgcgattttatatatagacaatcatactttgtcagtaaggctacgaataaagcagtcagtgtatggacaattaaattatgttgtgtccgtttacgacccgaacgataccaacgttgccgtcagagacacccacaggacagcacggggctttctttcgcttgataagttcatcagttcaggtcccgatgctcagacctgggctgatagatatgttcgcaactgtgcaattgctattctgcccctattacctgtgggagttccaggggctattttcgcgggtattgcatcacgaatgccatttgcccctatacatccatcggcaatgttgttaataatggctacaggccagtctcaacagcttattacattattcaaacagttgcccatactccctgaaaaagaaatcattgaaataataactgcgcagaatagcgttggtacacctgctttatttttggctatgatgaacggacatactgacaacgtgaaaatatttatgcaagaaattcagtcactggtagataatcacatcattcatgaagataatctggttaaattactgcaaactaaaagtgctaacgaaacacctggactttatatctccatgttgtatggattcgatgaaataatcgatatctttctgaatgcattaaccactccaatagcacaagagcttttaaacaaaaaactggtgatgagtattttagccatgaaaatacatgatggtgagccaggattatacgccgcaatggaaaataatcaccctttgtgtgtcacacggttcctctctaaaattaatggcatcgcctttaaatacaagttgagcaaagctaacatcatggatttattaaaaggagctacagcacagggaacccctgcattatacatcgccatgagcaagggtaatgaagacgtcgtgttatcttatatatcgacgctgggtgcttttgcaaaaaaacattcttttagtcaacatcagttatttacactattggccgctaaaaatcatgacaacatgtcagctgttcatatagccattcatcataagcattataaaactgtagaaacatattatgctgctattaatgcaatcagccaaagcctgagttttagtgctgatgaaataaagacgtatttataaccagctatttacgatatatatcgatacataattttatttttttcataaaacgcagaaacagtgaccatgtgcacaacgccacccgacggctgtaataacaaaaaatcccttgatgcctgtcccttttgttacactccgttatcacgcacaagagatatgcaggacactggtatgccgactaaacgctttgataaaaaacactggaagatggtggtggtgctactggcaatctgtggcgctatgttgttgctacgttgggcagcaatgatttggggctgagcagtgacaaacgaagacagccagaccgcataacacggtccggcagataattttacatgctgtagcccagcgataaggttgtccgacggtcggtatgttccggtgcagactctggaggttcagagttccatgtgacgttgtaagccaccttcagtccaaaatgttcattaatagcaacatttaatgcgctttcggagttcagcgttgtgtcttccgcgccaaagaccgaaacaccctgcgtaaatttagcgttgtcagtcaactgccatgcataagccccggaggcatagcccagcggctgggtttcactggcattgtcggtatatttgtcgtaacgcacacctggaccgaattcaaagcggaaactgtgtaccgggccattcaaaaactgacgaccataacccgcggtcaacacatcgcgctctcgatagccgttataacggtctgtcagccagcttgcctgaccaaataaatagtcataatcagttaaattaaaacggctacgcccgcccgccgcatatttttctgaagaacgctcatcattagaagaagtattactggcgttcccccacagcgaccaggcagtggtgtgtccataccaggtcatggtggtgtcagccgtaagtgaggagcttttcgtattgcctgattgtgcaagatatcctgcgttcagattaccttcgaaaggttttttagcgctggcaggatcatccatgacagtaaaaacggaatcatcggcagctgcattcagtgacgcaaacatgccccccgccaacataacgatggcaggaactgtcttcaaaagcttcatttatcaagagtccgtacaacaaaaaaagagaccatcgcggtcccggaaactttcttaaggatcaaagattagcgtccctggaaaggtaacgaattataaaaaggcgcgaataacttagcaatgtattcttatttcattttttgaataagcatgtggcgaaaacagatttttatttatatatatttatctgcaaaattttaaataaagctccaataaatcatattgttaatttcttcactttccgctgattcggtgccagactgaaatcagcctataggaggaaatgatggtacgtatctatacgttgacacttgcgccctctctcgatagcgcaacaattaccccgcaaatttatcccgaaggaaaactgcgctgtaccgcaccggtgttcgaacccgggggcggcggcatcaacgtcgcccgcgccattgcccatcttggaggcagtgccacagcgatcttcccggcgggtggcgcgaccggcgaacacctggtttcactgttggcggatgaaaatgtccccgtcgctactgtagaagccaaagactggacccggcagaatttacacgtacatgtggaagcaagcggtgagcagtatcgttttgttatgccaggcgcggcattaaatgaagatgagtttcgccagcttgaagagcaagttctggaaattgaatccggggccatcctggtcataagcggaagcctgccgccaggtgtgaagctggaaaaattaacccaactgatttccgctgcgcaaaaacaagggatccgctgcatcgtcgacagttctggcgaagcgttaagtgcagcactggcaattggtaacatcgagttggttaagcctaaccaaaaagaactcagtgcgctggtgaatcgcgaactcacccagccggacgatgtccgcaaagccgcgcaggaaatcgttaatagcggcaaggccaaacgggttgtcgtttccctgggtccacaaggagcgctgggtgttgatagtgaaaactgtattcaggtggtgccaccaccggtgaaaagccagagtaccgttggcgctggtgacagcatggtcggcgcgatgacactgaaactggcagaaaatgcctctcttgaagagatggttcgttttggcgtagctgcggggagtgcagccacactcaatcagggaacacgtctgtgctcccatgacgatacgcaaaaaatttacgcttacctttcccgctaacaaaaacattcccccagcattgggggaatcatcaccaacctgtcggcaacgcgtttctccgactatgctcaaaagtcatgtgataacaaaggggtgaactatggccagtggcgatcttgtccgttatgtcataaccgtcatgttgcatgaggatacattgactgaaattaacgagttgaataattacctgactcgcgacggttttttgctcactatgacggatgatgagggaaatatccatgagctgggaactaacacttttggacttatcagtacccaaagtgaagaagaaattagagaactggtttcggggcttacccaaagtgcaaccggcaaagatcctgaaatcaccatcacgacctgggaggaatggaatagcaacagaaaataaatggtttttgggcaataatcagtctgtggtgtgcgttagctcgtgtttttacaccgcattcttgcgctaaccttatgatctggcagacaacatgggagagacatcatgtggcaggcaatcagtcgtcttttgagcgagcagttaggtgaaggcgaaatcgaactgcgtaatgaactgcctggcggagaagtccatgccgcatggcatttgcgctatgcaggacatgattttttcgtcaaatgtgatgaaagggaactgcttcccggttttaccgccgaagccgaccaactggagttactgtcgcgtagtaaaaccgtcaccgtgcctaaggtttgggcagttggcgctgaccgtgactacagttttctggtgatggattatctcccacctcgtccgctggatgcgcatagcgcatttattcttggtcagcaaattgcgcgtttacatcaatggagcgaccaaccacaatttggccttgatttcgataacgcgctctccacaactccacagcccaacacctggcaacgtcgctggtcaacgttttttgctgaacaacggattggctggcagttggaactggctgcagaaaaagggatcgctttcggcaatatcgacgccatcgtcgagcatattcagcagcgtctggcctcacatcaaccgcagccttctctgttgcacggcgatttatggtccggcaactgtgcactgggtccggatggcccgtacattttcgacccggcctgctactggggtgaccgagagtgcgacctggcgatgttaccgctgcatactgaacagccgccacaaatctatgacggctatcagtcagtatccccgctacctgccgatttccttgaacgtcaaccggtttaccaactctacacgctgttaaatcgtgcaaggttatttggcggtcagcatttggttattgctcagcagtcattggatagattattagcagcatgatatgggttgaggataatggccgctccgtgcggccttttgattaaataaacccaagcagagaaaagaacacataacctgcagcaatacaaataaccggcaggatatacagtgagaaaaactgcaggaaaatagtatggtgcggaacaacaatacgggactcaatttgttcacgcgttagcccctcttcccctttggctttttccagaatgagttgatcttcaacaccttcccgcaagaagcgcgcctggcgactcatccgggcaccggaatcctgcaacgccagtccgacaaaaatcaggatgaaaatcacccagaacataacgttcacgccaccattaaaattgggcgtcggggagttataccagaatagattcaaaaaaggcgtattcgcctgcatcatatcgatcatgacatgagtaaagtcgagcatgaccgcattaatgccttccttgttttcctgccgggtattcataaatttcagcaaagaaatcaatgtagagatcaatgcaggtataaaaatcacccaacccaaaatccttttcaaaacagcaatgcgtccagcttgttgatacgtcatgagttctccttgattaagacgcgtcgtttcacttagtttacctgtagatatctgttttcgcccattctttaaaggcgatatgataggcgcttaatcataagcacggcttaataccttacacataatgctctaaaggagaggttgtaatgtcaaccccgcgtcagattcttgctgcaatttttgatatggatggattacttatcgactcagaacctttatgggatcgagccgaactggatgtgatggcaagcctgggggtggatatctcccgtcgtaacgagctgccggacaccttaggtttacgcatcgatatggtggtcgatctttggtacgcccggcaaccgtggaatgggccaagccgtcaggaagtagtagaacgggttattgcccgtgccatttcactggttgaagagacacgtccattattaccaggcgtgcgcgaagccgttgcgttatgcaaagaacaaggtttattggtgggactggcctccgcgtcaccactacatatgctggaaaaagtgttgaccatgtttgacttacgcgacagtttcgatgccctcgcctcggccgaaaaactgccttacagcaagccgcatccgcaagtatatctcgactgcgcagcaaaactgggcgttgaccctctgacctgcgtagcgctggaagattcggtaaatggcatgatcgcctctaaagcagcccgcatgcgttccatcgtcgttcctgcgccagaagcgcaaaatgatccacgttttgtattagcagacgtcaaactttcatcgctgacagaactcaccgcaaaagaccttctcggttaatgaccaggggcagtgatctcgctgcccctggttctttatctgaaattgcattcaactgacggattaatcgtcaatttaagagaaagagttacaccgtcaccacttccgtgcactgtataaaaatcctatactgtacgtatcgacagtttagtgagttttatcatgacggcggaaggtcaccttctcttttctattgcttgtgcggtatttgccaaaaatgccgagctgacgcccgtgctggcacagggtgactggtggcatattgtcccttccgcaatcctgacgtgtttgttaccggacatcgatcacccaaagtcgtttcttgggcagcgattaaaatggatatcaaaaccgatcgcccgcgcttttgggcatcgtggttttacccacagtctgctggcggtatttgcgctgctggcaaccttttaccttaaggttccggaaggctggttcattccggctgatgcgctacaaggaatggtgctgggttatttgagccacatacttgccgatatgctgacacccgccggtgttcccctgctctggccatgccgctggcgtttccgcttgcctatcctggttccccaaaagggcaaccaactggaacgttttatctgcatggcattatttgtctggtcggtatggatgccccattcattacccgagaacagcgctgttcgttggtcatcgcaaatgatcaataccttgcagatccagtttcatcggcttattaagcatcaggttgaatactaaaaaggcaaaaatcacctttctggaataagcaattccatttgaatataagagccagctcacagttctgttaatcttgcgccaacactatgactgctacgcagtgatagaaataataagatcaggagaacggggatgaactttccattaattgcgaacatcgtggtgttcgttgtactgctgtttgcgctggctcagacccgccataaacagtggagtctggcgaaaaaagtgctggtgggtctggtgatgggtgtggtttttggccttgccctgcataccatttatggttctgacagccaggtacttaaagattctgtacagtggtttaacatcgttggtaacggctatgttcaactgctgcaaatgatcgttatgccgttagtcttcgcctctattctgagcgcggttgcccgtctgcataacgcatctcagttaggcaaaatcagttttctgaccatcggtacgcttttgtttaccacgctgattgcggcgctggtcggtgtgctggtcaccaacctgtttggtttgacggctgaaggtctggttcagggtggtgcagaaactgcacgtctgaacgccattgaaagtaactatgttggtaaagtctctgatctgagcgttccgcagctggtcttgtcctttatcccgaaaaacccgtttgccgatcttaccggagccaatccgacgtcaattatcagcgtggtaatttttgccgcattcctcggcgtagctgcattgaaactgctgaaggatgatgcgccgaaaggtgaacgcgtcttagccgctatcgataccctacaaagctgggtgatgaaactggttcgcctggtcatgcagttgaccccttacggcgttctggctctaatgaccaaagtggttgcaggttctaacttgcaagacatcatcaaactgggaagtttcgttgtcgcgtcctacctcggtctgctgattatgtttgcagtgcatggcattctgctgggcattaatggcgtgagtccgctgaagtacttccgtaaggtatggcctgtgctgacgtttgcctttaccagccgttccagtgctgcgtctatcccactgaatgtggaagcacaaacgcgtcgtctgggcgttcctgaatccatcgccagtttcgccgcctctttcggtgcaaccattggtcagaacggctgcgccggtttgtatccggcaatgctggcggtgatggttgcgcctacggttggcattaacccgctggacccgatgtggattgcgacgctggtcggtattgttaccgttagttccgcaggcgttgccggtgtcggtggtggtgcaactttcgccgcactgattgtactgcctgcgatgggcctgccagtaaccctggtggcgctgttaatctccgttgaaccgcttatcgacatgggccgtacggcgttaaacgttagtggctcgatgacagctggcacgctgaccagccagtggctgaagcaaaccgataaagccattctggatagcgaagacgacgccgaactggcacaccattaattcttatgctggcaacggtccgttttgtataggggccgttgccttactttttaaatgttccatcgcggcgatgcatactgactcatatttaaacagatcgtcagcgaaaaaaatgtccaacttatcaatacattcctggctcaatgaatgtgcctgtagcgagaagcttaaaacctcatacccgagacgttttctaagtgaactatctggaatactcataatatcttcaagcacaccacttcccattcccggaagatttagtggattaaaaagaagattgatattaagcattgatattatcgaaggaaactttaggagactctcatttttttgaatcgcagcaaaaatgctcccgacaggatgtatataattttgttcatagtatatagtccttaaatagtgaataaccaacctgttttttatactgatcaaattggtcattttttctgggcgaaatacagaagtgacatccattccaataaaatctttatttatacctcttatccgaatttcactaccataaagattattaattattactctatatttaacattgtcctgcagatatgtatcaaaactaagtgctggcgctcctggctttgaggcatcatagttaatgttagacatataggcaatcatataattaaagtttgattctgctatttcatcgcagtcacattgacccgttgatataaagaaagtgagtgctgtcatagtagactgcagcctttctttaaaagagtcgaaagccaggcttttaatatttaaatcaccataattactctgtattaagtttgtagaaaacatctcccgcctcatattgttaacaaaattattatctcatttaaatctaagtcatttacaatataagtttaagagcgacgccacaggatgaactatcaaaaatagctcatcatgattagcaaaacttaaccattttaaaataaataaacaattaaagaaaaaagatcacttatttatagcaatagatcgtcaaaggcagctttttgttacaggtggtttgaatgaatgtagcaacgaaatacagaatttcaggtcatgtaactcccggcaaaaccgggaggtatgtaatccttactcagtcacttccccttcctggcggatctgatttgcccaacgttgggcagattcaggcacagtaaacgccggtgagcgcagaaatgactctcccatcagtacaaacgcaacatatttgccacgcagcatccagacatcacgaaacgaatccatctttatcgcatgttctggcggcgcgggttccgtgcgtgggacatagctaataatctggcggttttgctggcggagcggtttcttcattactggcttcactaaacgcatattaaaaatcagaaaaactgtagtttagccgatttagcccctgtacgtcccgctttgcgtgtatttcataacaccgtttccagaatagtctccgaagcgggatctggctggtggtctatagttagagagttttttgaccaaaacagcggccctttcagtaataaattaaggagacgagttcaatgtcgcaacataacgaaaagaacccacatcagcaccagtcaccactacacgattccagcgaagcgaaaccggggatggactcactggcacctgaggacggctctcatcgtccagcggctgaaccaacaccgccaggtgcacaacctaccgccccagggagcctgaaagcccctgatacgcgtaacgaaaaacttaattctctggaagacgtacgcaaaggcagtgaaaattatgcgctgaccactaatcagggcgtgcgcatcgccgacgatcaaaactcactgcgtgccggtagccgtggtccaacgctgctggaagattttattctgcgcgagaaaatcacccactttgaccatgagcgcattccggaacgtattgttcatgcacgcggatcagccgctcacggttatttccagccatataaaagcttaagcgatattaccaaagcggatttcctctcagatccgaacaaaatcaccccagtatttgtacgtttctctaccgttcagggtggtgctggctctgctgataccgtgcgtgatatccgtggctttgccaccaagttctataccgaagagggtatttttgacctcgttggcaataacacgccaatcttctttatccaggatgcgcataaattccccgattttgttcatgcggtaaaaccagaaccgcactgggcaattccacaagggcaaagtgcccacgatactttctgggattatgtttctctgcaacctgaaactctgcacaacgtgatgtgggcgatgtcggatcgcggcatcccccgcagttaccgcaccatggaaggcttcggtattcacaccttccgcctgattaatgccgaagggaaggcaacgtttgtacgtttccactggaaaccactggcaggtaaagcctcactcgtttgggatgaagcacaaaaactcaccggacgtgacccggacttccaccgccgcgagttgtgggaagccattgaagcaggcgattttccggaatacgaactgggcttccagttgattcctgaagaagatgaattcaagttcgacttcgatcttctcgatccaaccaaacttatcccggaagaactggtgcccgttcagcgtgtcggcaaaatggtgctcaatcgcaacccggataacttctttgctgaaaacgaacaggcggctttccatcctgggcatatcgtgccgggactggacttcaccaacgatccgctgttgcagggacgtttgttctcctataccgatacacaaatcagtcgtcttggtgggccgaatttccatgagattccgattaaccgtccgacctgcccttaccataatttccagcgtgacggcatgcatcgcatggggatcgacactaacccggcgaattacgaaccgaactcgattaacgataactggccgcgcgaaacaccgccggggccgaaacgcggcggttttgaatcataccaggagcgcgtggaaggcaataaagttcgcgagcgcagcccatcgtttggcgaatattattcccatccgcgtctgttctggctaagtcagacgccatttgagcagcgccatattgtcgatggtttcagttttgagttaagcaaagtcgttcgtccgtatattcgtgagcgcgttgttgaccagctggcgcatattgatctcactctggcccaggcggtggcgaaaaatctcggtatcgaactgactgacgaccagctgaatatcaccccacctccggacgtcaacggtctgaaaaaggatccatccttaagtttgtacgccattcctgacggtgatgtgaaaggtcgcgtggtagcgattttacttaatgatgaagtgagatcggcagaccttctggccattctcaaggcgctgaaggccaaaggcgttcatgccaaactgctctactcccgaatgggtgaagtgactgcggatgacggtacggtgttgcctatagccgctacctttgccggtgcaccttcgctgacggtcgatgcggtcattgtcccttgcggcaatatcgcggatatcgctgacaacggcgatgccaactactacctgatggaagcctacaaacaccttaaaccgattgcgctggcgggtgacgcgcgcaagtttaaagcaacaatcaagatcgctgaccagggtgaagaagggattgtggaagctgacagcgctgacggtagttttatggatgaactgctaacgctgatggcagcacaccgcgtgtggtcacgcattcctaagattgacaaaattcctgcctgatgggaggcggcgcaattgcgccgcctcaaatgatttacatagtgcgctttgtttatgccggatgcggcgtgaacgccttatccggcctacaaaactgtgcaaattcaatatattgcaggaaacacgtaggcctgataagcgaagcgcatcaggcagttttgcgtttgtcagcagtctcaagcggcgcagttacgccgcctttgtaggaattaatcgccggatgcaaggttcacgccgcatctggcaaacatcctcacttacacatcccgataactccccaaccgataaccacgctgagcgatagcacctttcaacgacgctgatgtcaacacatccagctccgttaagcgtgggaaacagtaagcactctgacggatagtattatcgataaacgccggatgacacatcacctccagcgaacgatcaccccgatggcctgcgtcatccagcacttgcaggaacagcgactcactgatctcttcaccgtagaatgcactgctgaatccctgggtagtgcgcaggttgaccggcaaatcaaacgccatctgacgatccgcccgcaacgcaatgccctgctctgccgcaaacctggcaacaatcgggaaaatctgcgggaacatatgcacatgatgatggctatcaagatgcgtaggtttgcgtccaaatagctcaatgaaacgcaaatactgactgacaagctcctgagtaatttcttccagcggtaaagcatcttcttctgccaactgccagatccattttcccagcacaccatcgcgggttaaccccggcatagctgtcagtggcttacccatagtaaggacaaagtgcatccctatggccagactcggttcatcacgactcaactgcaccgcatggtcaatagcctgcccattcaccagcgccgtcgtcgacgtgacaatcccattgcgacaggcctcgataatgccgtagttctgacctttgcttaagccaaaatcatcggcattaacaatcagtaagcgttccataatcagcctcggttaatgtgcttttttaagctctgcgatgcagtcggcaaagtttggcagccatttctcgtgcgccagaatcatctcgcgtgccagcagctcagcatcgcgatcggaatgcaccaacggactaaggtttagcgccagtaacacatcgttaaattctccgctaagtgcggcgttactggcagcaatctcgaagcctttaatggtgtgaatcagccccattactttatcatcgaaatgcgtaatgcgcggatgtggcgtcgcgccatcgcgccccagcttacaggtcatttctactgcccagtctgccggaatattatcaatctgcccatgatgcgggatattaacgtaatgttctgcttgcttgtcgttgtagatagcgttgatcacttcgcatgctgcatcagagtaataagccccaccgcgctgttccagttctttcggcttaactttcagctcaggatttttatacagctcaaaaagttgtttctcgactttctgtactacctgcgctcgtgcgccgcctttgtagtattcgcccatttcaatagccagcatctctttctgcttgaagtaatacagcagataagaacatggcagcagattcaacgaacgaattaagccctcactaaatggcagatcgaaaatattttttacagaggacgcttttaactgccctgacgccacaccatcaagcaattcggcaaagcgcgacttgccatttatcagcacatccttaatgaacaccatatggttgaggccgaacaaatcgatagataaatcatcgctgtctttcagcatcagaacatcgcgaataaacatcttcatgccgatcggaatattacacacgccgataaagcgtttaaatccggtatgacgataaacggcttcagtgaccattcccgccgggttagtgaagttaatcacccatgcattcggacaaagttcttcgacatcttttacgatgtcaaaaatcaccggaatggtacgcagacctttaaacaaaccgcccgcgccgttggtttcctgaccaagataaccatgacttaatggaatacgttcatccagttcacgcgccggtaattggccaacgcgcagttgggtagtaacgaaatcagcatctttcaatgcttcgcggcgatccagcgttttataaagcttcatcgggacgccagcgttatcaatcatccgttggcagagatcgaaaataatatccagtttcggtttaccaccttcgacatccaccagccataattcgctgaccggcaattcgtgataacgcttaataaatccttccagtaactccggggtatagctgctcccgccaccaatagtgacgacttttaatttctggctcataatttctcccttcagtacagaatactgatatctggcatatctgcccccccggacataaataatccagcaacaggacagatatgtgaattgtcaggtataacgacttactgattaaattcagtcaatttcttacgatagctcttaggcgtaaaggacgttaatttcttaaacgttttaataaacaaactcgggctactataaccggcctcaaacgcaatatccgtcactgaatagttggtcatttccagttgttttttggcaaaattaatacggatttcattaataatctgcattggcgttttgccataatatcgttgagtcgctcgcgtcaaatattcctgtgatttggctgacaacgccaccatattctccagcgccgattcactaaactgctctttatcatgcatcttttctaccgtacttttcagccactgcggtacatcatcaatcacctgttcttcgcggtaatgacgtaaacggttaatgacataaaaagtaaccatctcaacaaactcttccagccctgtttcgcggaaattcaatgaagaaatcactgtttccacataggtgagaaaagcgttattggtccggtatacctgcgaagcgacaaagcaataaggcaacaatggcaggtaatgctgctcaaaaaagcgtttactgatcccaacgttcaatatgcgcgtggcaccaaactcataaaaactttgatggtgcgaacctaacggaataaaaacaaaatcgccccgttccagtaacacgcgcttaccgttaatctcctggaaataacgcccggttaataccagagtaaattcataatagtcgtgctgatgcagtccgctgatactctcagttttgttatagataaacacatggaagtttttgccattaaacaactgctgttctcgggcagtggcaatttccggcgcgttaatcactggctgcatcatcgactccttatgccttcagtttttcatgaagctcaattaattcagtaatcagttcacgcgcaagcatggacgtcattaaatgatcctgagcgtggaccagcaccagactcactttcatcttaccttcgcccgcatcgccttcaatcagtttcgtctgtaccagatgcgcttcattcaatgccatccgtgactgatccatcatggcttttgctgcggcaaaatcgccctgcttcgcctgtttcagtgccgcatacgccaggctgcgcgcttgtccggagttgatgatcagccccatcaccacttcttccagctcttcagcttccgtttgcgtatcgggaatgttatcgagatccatcatacatcgttcctctcttttcttaccggcacgattacccgtaccggcatcgattaaaatttcagggcgttagcgatatcttcttcgctctcttctttatcaatcgcattttgtgctttgttagccaccacaacaaagggcagataaattaacgttgcgatgccaaggttgaagagtgcgaccagcaatgcggcgacgctaccgttggtgttaaagaaggctcccagaccggttggcatggtccacggtgcaatattggtcaccggaggaataatgcccatgtagtacgctgcgagggtgattgccgccagaatcggttgtaccagtacaaacgggataaacatcaccgggttcatgataattggcagaccaaacagaatcggttcgttaatctggaagatgccggacggcagcgccagttttgccacctgacgataatcagcacggcgagaggcgataaagatagccaggatcaggcctaaagtcgcaccactgcccccaaggaaaataaaggagtccagcatcggcttggcccagatatggaaggtcttaccggctgccagcgccgcttcgacggaaccatattgctgataggtcgcgatattttccagtgcccacggcgtcataatgccgttgtccagtgcggtcagcgccagcgcgccatgaataccgaagaaccagagcagtggaacaaagatcacataggcccagcccaccacgctacccaacgatgccagtggggttgagatggtatccataatgatctgatggaagttggtgccccaggtattcaacgcccaggcaataatccccatcacggaaagaataataaagccgggaattaatgccgagaaggaacgcgatactgaagcaggtacgctgtcgggcagtttaatgacccaattgcggcggacaataaaggtaaacatttctgccaccaccaggccaataataatcccggagatgatattcgccccacctaaccagtttgcaccaaccgcataggcctcaccgacactatatggggtgacggtcataaatgctgcaacggataacaacccagccgccagcgcatcgactttacgctcttctgccagcgccatgccaataaagaacggtgccattaaagacattattcctaatgttccgttatatacgttgccgccaatacctttcagaccattaagtgtttcaatggttgaggcgtcgaggcgaatacctaaggaataaaaaaacgacccctccccaaagcttagaaaaacgttgttaattaatacaaacatggcccccgcaagggttaacggcattaagcgaataaagccatttttgattgcattaacgtgtggctgctttcctattttaactgcaaaagggaggagtaccttttcaagcgatgcaataacattactcatagaaaaatacccttaaaaaccgcaatttaaatattgcggtattgatttatgaaataactctttgacgggaaaatttaaaataaattaatttgctgcggcttttttaatcgctgcaaccgcagccttaagcacgcctaaaccatcgactttgccataaagcagcgagtcaattacttcaaccggtttgttgggtaacaaacgctggatttcgggcaacatataagcaatctgcggccctaataacacgacatcggcattctgacctttttcaccagccagtgtttccggaaatgcttcaataatgaccggaacttcatatttttctgcctgtgcgcgcatttttgataccagtaaagaggtagacatgcccgcagaacaaaacagataaatgtgtttcttttccataaaactgccctcatcgacgattatctgtcagccagacactccgcaagccttaacctgcttccatgctctgggtaacttgcgaaaccaacatgactttttttgtggctgaaaggagtatacggtatagacctgagcaatagtatttctttgaccttataaattgtttctccttgacctgtggttatgaccctcttcacatttcgggcaaataattcgcgaagataattaagaactcaggccaaaaaaaaccggcgcaatggccggtttccgttgttactcaagctttcagacgaattgattacttcgcagcctgtggatcagtgtcgtattcagcacaggtctgataaccggagttgatgacatgtccggtatcatctaacgcgacaaagtaggtttctgctttaccatcacgttgacccaggatgtaggtctggcaagtaccgcgagcatggatcatgctcacttcagacgaaggtttacccgcaatttgtgcaacctgcgcccggctcatgccttttttgacgtctttcaccacaggctgtacaaactggtctttggtacgatcataagccgtacaacccgccagcatggttaataccgccgctgcactcagaattcctgccatattcttgttcatattccgtcctcttgtttatcagcgtgttagataagcctggaatacattgggcgctttttcaagcccgtgaacgaaacggctccgctttcagaggattcctgtatgacgttttaaccaccattcagcccgctgtcgcttgtcgtttcagtagcaacgggttagctttaaggaagttttgtcttttctgtctggaggggttcaatgacattgcaacaacaaataataaaggcgctgggcgcaaaaccgcagattaatgctgaagaggaaattcgtcgtagtgtcgattttctgaaaagctacctgcaaacttatccgttcattaaatcactggtgctcgggatcagcggcggtcaggactccacgcttgccggaaagctgtgccagatggcgattaatgagctgcgcctggaaaccggcaacgaatcactgcaatttattgccgtacgcctgccctatggtgttcaggccgacgaacaagattgccaggatgccattgcctttattcaaccggatcgcgtattaaccgttaatatcaagggcgcggtattggccagcgaacaggcattgcgggaagcaggcattgaactgagcgattttgtccgtggcaatgaaaaagcgcgtgagcggatgaaagcacaatatagcattgcgggtatgaccagcggtgtcgtggtgggcaccgatcatgcagcagaagccattaccggattcttcactaaatatggtgacggcggtacggacattaatccgctgtatcgtctcaacaaacgtcagggtaaacagttactggcggcattagcttgcccggaacacctttataagaaagcgccaacggccgatctggaagatgatcgcccttctctgccagatgaagtggcactcggcgtgacctatgacaatatcgacgactatctggaagggaaaaacgtacctcaacaggtcgccagaacaatagagaactggtatctgaaaaccgaacataaacgccgtccgccaattaccgttttcgatgatttctggaaaaagtaataatttgcacatattggattgtgcgaaaaagagtaatttgttcacgccggatgcggcgtgaacgccttattcgacctataaaactatgcaaattcaatacattgcaggagtcgaataggcctgacaggcgtagcacgtcagacggtgtaacctttgtcatcgacccgcctcttttttaatcgcttcccgcctgttacactggatagataaccagcattcggagtcaacagtggtacggcgtttaacttctccgcggctcgaatttgaagctgcggcaatttatgaatatcccgaacatttacgttcattccttaatgacttacccacccgaccaggggtgtatctgtttcatggtgaaagtgacaccatgccgctctatatcggcaaaagcgttaacatccgcagccgcgtcctttctcatttacgtaccccggatgaagccgccatgctacggcaatcccgacggatcagctggatatgtaccgccggtgaaatcggcgctctgctccttgaagcgcgattaatcaaagaacaacagccgctgtttaataaacggttgcgccgcaatcgccagctctgtgccctgcaattaaatgaaaagcgcgtcgatgtggtgtatgccaaagaggtggatttttcacgagcccccaacctgtttggcctgtttgccaataggcgcgcagctttgcaagcattgcagaccatcgctgatgaacaaaaactttgttatggcctgctgggactggaaccgttaagtcgcggtcgtgcatgttttcgttcagcgctaaaacgttgcgccggagcatgctgcggtaaagagagccatgaggaacatgcgctacgcttgcgccagtctctggagcgtttgcgggtggtgtgttggccttggcaaggggcggtggcgctgaaagaacagcacccggaaatgactcaatatcatattattcaaaactggctgtggctgggggcggttaattcgctggaagaagcgacaacgttaattcggacacccgccgggtttgatcacgacggttataaaattctttgtaagccgctgctttccggtaactatgaaattactgaacttgatccggcgaatgaccagcgagccagttgatttcactgaacaacagtttaccttgcggttgtaaaagccgcagggtgtgcctgccatcgaaccagcacgcgccctggtcggtagtgagcaatttatcgcccagttgccacgccccgttaatcacaaacaccaccccgccgcgtgagccaaaggtagtaaacgtacgttcggcaattctgactttcgccttacagacatccaggcgtgtcatgatgttgaaatccatcgacatctgccctgccgtcagtttcgcttttaccacctggtccgctgcaaaggcaaaaggctggaacggttttaaggtatggttaaagcggtctgcgctttcaaggagcatctcgccgccttccagcaacgtcactatcctttccatgccgggaaacaaagaaaactccccattcgccgcgatggatgcaatgctggcacgccagtaaaaatcacgttttgccggtgggaacgtgcaaatttcgcgcgtttcaccggcagcatttcgccacagattcaccgacattttacgcatatcaaagtattccatactcgctcccggcccgttcttttcattgttatcgttcaggtaaccgtggatggttatcggcaactcgggtgatttacgttagtggtgatcaggctttttttacaactgtttgagaagagaaaagaaaaccgccgatcctgtccaccgcattactgcaaggtagtggacaagaccggcggtcttaagttttttggctgaaagattattcagcagttgcaggcattttaccttttgccgctggacgttctgtcagacgcttctcaaaattagcattaaattgctttttctgttccggcgtcaggatgttgtaaattttgttctgggtttccatgtgcgccagcatgttagctttgcgctgttcttccatttttgcgatctgcgcttcagcttttactttatcgaaggtatcgctggcaatgatgtcatgcattgcgcggcgttcttccagcggcggacgtttcatctggtcacgctggcctttcatgatttcgcggatctgctgtttctgcgcgtcggtcaggttcaggtctttgaacatcatgtcctgatgcggaccgaacttgcctttgtggtgcatcatcggcttcgcgtcagccggtgctgcggtagtggtgtctgcggcatgggccaggttagccgcgccaagagccagggtagaggcaacaaacagtgcagttaatttacgcatattctatatccttcctttcagttatttattacggctttcttaagtagcgtgccgtgttgacgagattaactttactgactttagcgtcaattaatcagagcaacggtaaaacaatgaaagtgtaaaaaacacttttgcgccaattatggagaaaaaaagaaaatttgatggagagtgatgagagaatattacaacacgatgattttgcagagattatgaagaactataccggatgactggtgataaataaagcaaataaccaggattaatctgtattaatttataagaaagcaacttaatacccgcagaatgatttctgcgggtaagtattagcttattttttcgagcattaatcccgcgcgtaatcccaacgctaccaacggattagggaataacacatactctacatcatgggttacggtaaaacgttcctctccgtcctgcgccagcaatgttcctttctcaaacggcataaaattcagcgtgtcacttgccatatgcatttcgaaggacggcgagtggcgagtaatttgcgaaaccacccgataacggagcggcggtgttctcacgataccgacactctcaccagatagcagcgcagcaattgcgctggcagttactgcaaactggcgaagatcgttttgcccaaagggcaacgctttgccaagttccagcgtacaggccagcgcgccaaaatgtctggcgctgaaatgggtaaacgtaccaccaggttcctgatggaacaccagcgcctccagccccgccgcacccagccacgtcagaaatttctcgtcccagggaatgtcgcgttgcggtaatacaccgaactgcggatgcaaggagccacgaattgcggtatgtagatcaaggtgccagcgcacagattctttgccctggtcataaaaatcttccaggcactgttccagttcgcgcgcccgacaggtttctccgctttcagcaaatagctgccaacgaccgccaaacattcgattcatatcgctatggcaataacgtttcccttgcttcagcgcaggaggattcccgaggatcaccagcaaccgccaacgtaacgggatctcgccgtgagatatcgcgccaagcaacgcgtccagcatctccacaggtgccgtctcattaccgtgtattcccgctgaaatcaccagtgcgccttgcggtggcgttaatggcgtcagttccagcacaccatcgcccagccagcgccagcgaacgccgttgatttctcgctcggtgataaccggttttttacccgttaaggtcagagcaagaaaattatccattgccccctccctcgcgctggaacggataaaccgaaccgagattcagtaattggctcaatacatccagtgcttcccgcccttcgcgcagcaattgcgggtcggccagatcggcagcagtaaggcgatcgcggtagtaacgatccacccagtcattgagcgcattaaacagcgtatcgttcatcatcaccgccggattcaccgcccggcgttcttcttctgtcaataccacccgcaaccgcaggcacgccgggccgccgccattcgccatgctttcacgtaaatcaaagacttttagttcgctaatcgggttgtcagcggcaaggagttcattgagataaccccatactccggcgtgttcccgacactcctgaggcagcaccaacatcatggaaccatcatcgcggctcagcagttggctgttaaacagataggtagacaccgtatcagacacggaaacctgagttgccggaacttctatcgccataaaaccattgacccgcgcacgcaggtttgccagtaactgtgactggcgagcgaacgcctgttggtggcaaaacagcacctggcggttactcacggcaatcacgtcattatgaaaaacgccctggtcgataacgtccgggttttgctgggcgaaaatcacctgttggggattcacctgattcagccttgccaccgcctcgctggcttcgcgagtctgtcgcgccggataacgggaaggccgggtatcattgccttcttctcgcccgtagacaaaaagttgcatacccggttcaccgtaatgaccgccgagacgattgtggtttgccgccccctcatcaccgagcaacgctacctgtggcaacgccgaatggacgctaaatttctcttcgtcgttaaaaatcgcttttaacagcgattcagtgacgggcgcttccagcgaacggtgaaatttattgttcaggttggcaacggtgagatgcactttgccatccagcgtatcggcagatggcgcgatcgttgccgcattggctacccacattggcgaagcggaactgacgctggaaagccagtgcggtgcctggcgtgcaactttttccagtacctgctcatcgctaccactgaatcccaactgacgcagcaccggaataaacggacgctcgtgcggcgggatcacggcctgggggaatcccgcatcggcaagggctttcattttcagtaagccctgcttcgccgccagtcgcgggttagacacctgaaaacggtgacgggtagaggcttcattaccaaacgacaggcccgcgtaatgatgcgtcagccctaccagcccgtcgaaattgacttcccaggcgttcatcgcaccacctcatcggaaaaatccagcccggggttaagcgtggcgggcaatgttaacgagtccgactccaggctcgccatcggccatgcgcagtaatctgcggcataccaggcgctggggcgatggttaccggaagcaccaatgccgccgaatggcgcggtactggcagcaccggtaagcggtttgttccagttaacaatccccgcccgcgcctccagcaacagttgatcgaacttttcccgctcgggggaaaccagaccgcaagagagtccgaagcgagtgttattcgccattcgaatcgcttcatcgaaagtatcataacgccagacgcgcaataacggtccgaacacctcttcatctggtacgccagcaacgcctgtcatttcaatgatccccggcgtcagcaacgatgtccctgcttgtaataagcgcggcgcaagcaggggtcgtccgcccatcgcttccagttgctgccatgcagtaaccacctgctgtgcggcctgttcagaaatcagcccgccaataaacggctgcggttcgtcatcccagttgcccggcgttaatcgctggctgacggcaaccagacgagcaagaaacgcatcgccctgcgccccgcttttcagcaataaacggcgggcgcaggtgcagcgttgaccggctgtgacaaacgccgactgaatggtcagatggacagccgcgtcgatatccgccacctcatcgataattagcggattattaccgcccatctcaagggcgagaattttctccggctgaccggagagctggcgatgcaactggtagcctgtattggcgctaccggtaaacagcaaaccgtcgagatcctccagcgcactcagcgcctgacccgtttcacgcccgccctgcaccaggttcagcacgcctggcggcaagccagcctgctgccataaacgcattaccgcttcgccactccacggtgtcagttcgctgggtttaaagataatggtgttacctgccagcaatgccggaacgatatgtccgttcggcaaatgaccagggaaattatacggcccaaacaccgccagcacgccgtgcgggcgatgtcgcaggctcgccgcgccgtccggcatttcactacgctgctcgccggtacgaacgtgatacgccttaattgatatcgcgattttattgatcatcgccgtcacttcggttgccgcttcccagcgcggcttacccgtttctctggcaataatcgcggttaattcggctttattgctttccagcagtgcggcaaagcgttcgacaacggcatgacgttcagcaaatgaaagccgcgcccagcgcggaaacgccgcacgggctgcccgacaagcctgctcgacctgagcggcatcggcatcattgccttgccataacacctcgcccgataccggattacgcttcacacgcgatgcgccctggcccgttatccagtcaccgttaatccataaagtcatgctgttttctcctctgcgcacaggcgcaccagacgaacgcgatccccggcgtggcatttgagggcatccagttgtgcggcggttaaaatcaaacgctcggttgccggatcggtacgcaccagcaccacgcggaaatggtgataattttcattggcgaccaggcaggctgggaaatcgccctgcgcaggctgcccttctgccacttccaccagccgacttttacggatggcgcgcacgcggtcgatgtcacactcaagcgtcggcccaccgtcaaagatgtcgatatagttacggtagcgaaaaccttctttctccagcaccgcgcgggcaggcgcggtttgcggatgtacctgaccgatgacgtcctgggcttcctgggataaaaagtgggtatagatcggatgtttcggcatcagttctgcaataaatgccttttgcccggtgccgcagagaaaatcggcgcggctaaaatccatcgaaaagaagcgtttaccgaggctttgccagaacggtgaatagccgtgttcgtcaatcaccccgcgcatttcagcaaccactttgtcattaaacttgtcgcgaaaagccgccataaacataaagcgcgatttcgacagcaaatagccgttgccctctttgcgccagtccgggtcgagaaacagcgtgcacagctcgctgctgccggtgtgatcgttactgagaaacagcgtcggcaatgcgttatagacattcagctcttttgaggcgtgaaccaacgtgccgacgcgatagttgtaccagggatcgttcagcccaaccgccacctcaatggcacaaatccccgccacggtgcctgtctcgctatcttccagcacgaacacatagccctgctcacttttgggcagttcgccttgccaggttttgattgccctttcgatacgcgccgaaagcgtggcttcattggcgggaagcgacgtcaggccgccgcccgttttgctggcaagctgcatcagcgccgagacatctgatcgctcaacgggacggatgaccatcatgatgaacctcggctaacaaagtgttcgcaagcagctgcaaagcgatccagtccggtcgtcacctcttcttcgctgacattgagcgcaggcgcaaaacgcaccacgttgccacccgcaatcagtaccatcacgcctgctttcgccgcttcctgagagatctgtttcgcttgcccggcgtaatcggcattcagtacacagccaatcagcaaacctaagccgcgaacttcactgaacaaaccatagcggtgattaatagtattaagacgctcaacaaaccagtcgtgacgctgtttaacgccattaagcatctctggtgtgttgatgagctccagcactttgcctgccaccgccgaggccagcggattaccgccataggtggtgccatgagtgccaacggtcatcacgcgggcgcactcttcggttgccaacaacgcaccgaccgggaaaccgccgcccagcgctttggcggtagttaacagatcaggcgtcacgccgtagtgcatataggcatacagttccccggtgcgcccgacgccggtttgtacttcatcaaaaatcaacagcgcattgtggcggttacacaattcacgcagaccttgtaaaaacgcgttgctggctggcaccacaccgccttccccctggatgggttcgacaatcaccgcacaggtagagtcgtcaatcagcgcgctggcagagttaatatcgttatatgcagcatgacgaatatccgccggcagtggcgcaaaatcctgtgaataggctggctgcccacccgcactgacagtaaacagcgtgcgaccatgaaacgcatttttgaacgccacgatgccgctcttatggctgccgtagcggtcgtgagcgaatttacgcgccagttttagcgccgcttcgttggcttccgcaccggagttacaaaagaagacgcgatcggcaaacgtggcgtcgatcaattttttcgccagtcgcagtaccggctcgttggtgtaaccgttgccggtatgccagaacttactcgcctgttcgttcagcgcttcacgcagttccggatgcgcatggcccagcgcgttcaccgcaatgccacccgcgaagtcgatatactctttcccctgctgatcccacaagcgcgaaccttcgccacgtaccggtataaagggtgccggagcgtaaacaggtatcatccattcatcaaagttttcacgcgtaattggctgagacatagcgacctctacagtaaataattcgttatttatatgttaataataagtaatgtttgcgctgtaaatgtagattgcagggttcgtgccagccagtgataaaagtgcataaacggcggaggctaactggaaatcaaggagttataaccaaaccatatgcatttaaagtgcatataaagtgaatacgtttgcgatgtgggtgaataaaaagaataaaaaacgcaatgttatgcagaagtaaaatataattctggaattgtgatcattgacgaaatttactggaaattactgcgccattctgacgcagcgcgcaccaaaagcgggcattttttgcgccatcgttgacatcattaacaaccatcgatcaaatcacttaacaacaggcggtaagcaacgcgaaattctgctaccatccacgcactctttatctgaataaatggcagcgactatgaaatttgtctcttttaatatcaacggcctgcgcgccagacctcaccagcttgaagccatcgtcgaaaagcaccaaccggatgtgattggcctgcaggagacaaaagttcatgacgatatgtttccgctcgaagaggtggcgaagctcggctacaacgtgttttatcacgggcagaaaggccattatggcgtggcgctgctgaccaaagagacgccgattgccgtgcgtcgcggctttcccggtgacgacgaagaggcgcagcggcggattattatggcggaaatcccctcactgctgggtaatgtcaccgtgatcaacggttacttcccgcagggtgaaagccgcgaccatccgataaaattcccggcaaaagcgcagttttatcagaatctgcaaaactacctggaaaccgaactcaaacgtgataatccggtactgattatgggcgatatgaatatcagccctacagatctggatatcggcattggcgaagaaaaccgtaagcgctggctgcgtaccggtaaatgctctttcctgccggaagagcgcgaatggatggacaggctgatgagctgggggttggtcgataccttccgccatgcgaatccgcaaacagcagatcgtttctcatggtttgattaccgctcaaaaggttttgacgataaccgtggtctgcgcatcgacctgctgctcgccagccaaccgctggcagaatgttgcgtagaaaccggcatcgactatgaaatccgcagcatggaaaaaccgtccgatcacgcccccgtctgggcgaccttccgccgctaatttagcagctctcctggctcaaactgggtcaggagaattaaccttgagaaaaatcaacaaactgtcagtaatgatttgttgcctgccgtcctttgttataccgtctctgcgtttttagttgtctgaccacttctctattatcaagtttgatataggaaactccacgatgaacgctgagcgtaaatttctttttgcctgtcttatttttgcgctggtcatttacgctatccacgctttcggtttattcgatctgctcaccgatttaccccacttacagacactcatccgccagagcggatttttcggctatagcctctatattctgttattcatcattgccaccctcttgctgttaccaggaagcatactggtgatcgcgggaggaatagtttttggcccgctcttagggacactactctcattaattgccgccacgctggcctcctcgtgctcattcctgctggcgcgctggctgggacgtgatttactgctgaaatacgttggccatagcaataccttccaggccattgaaaaaggcattgcgcgtaacggtattgattttcttattctgacccgcttaatcccgttgtttccttacaatattcaaaattacgcttacggattaaccacaatcgccttctggccttatacccttatttcggcactcacgaccctacccggtattgttatttataccgtgatggcaagcgatctcgccaatgaaggcattacgctgcgctttattttacaactctgtctggcgggcctggcgctgtttattctcgtccagctcgcaaaactctacgcccgacacaaacatgtggatctgtctgcttcgcgccgcagcccacttactcacccaaaaaatgaaggatagaacgatgttgcaacattattcagtgtcatggaaaaaaggactggctgcactctgtttactggctgttgctgggcttagcggctgcgatcaacaagagaatgcggcggcaaaagtggaatacgacggactttcgaacagccaaccgctgcgtgtcgatgccaataaccatacggtaaccatgctggtgcaaattaatggtcgtttcctcaccgacgacactcgtcacggtattgtgtttaaagatggctccaacggacataaatcgctgtttatgggttatgcgaccccgaaagcattttatgaagccctgaaagaggcaggtggtacgccgggcgaaaacatgacgatggataataaagaaacgactcatgtcacaggcagcaaactggatatttcggtcaactggcaaggggcggcaaaagcgtattccttcgatgaagtgattgttgacagtaatggcaagaaactggacatgcgctttggcggtaatttaacggcagcagaagagaagaaaacgggttgcctggtgtgtctggatagctgcccggtcggcatcgtcagcaatgcaacatacacttatggtgcggttgaaaaacgtggtgaagttaaattcaaaggcaatgcctcagttctcccggcggataacacgctggcaacggttacctttaaaatcgccgaataaagccaggataaaggatgatgatgatgcaatcgcgaaaaatctggtactaccgtataaccctcatcatcctgttgttcgctatgctgctggcatgggcgctgcttcccggcgtccatgagtttatcaatcgcagcgttgcggcgtttgccgccgtggaccaacagggtatagaacgctttattcagtcttacggcgcactggcggcagttgtctcgttcttgttgatgattttgcaggccattgctgcaccgctacctgcgtttttgatcacctttgccaatgcgtcgctgtttggcgcgttctggggcggcttgctgtcgtggaccagttcgatggccggcgcggcgctgtgcttttttatcgccagagtgatgggccgcgaagtggtggaaaaattaaccggcaaaaccgtgcttgacagtatggacggctttttcactcgctacggcaaacacaccattctggtctgtcggttattgccttttgtccctttcgatccaatcagctatgctgccggtttgacttcaatacgttttcgctcgttttttatcgccaccgggcttggtcagttaccggcaactattgtttattcctgggcgggcagcatgttaacaggcggtactttctggtttgtcaccggactgtttattctgtttgccctgaccgtggtgatttttatggcgaagaaaatatggcttgaacgccagaagaggaatgcctgatgggtttaccgccgcttagcaaaattcctttaattttacgtccacaggcgtggctgcatcgtcgccattacggcgaggtgctaagccccattcgctggtgggggcggatcccgtttatcttttatctggtgtcgatgtttgttggctggctggagcgcaaacgctcaccgctcgatccggtagtacgatcgcttgtcagcgcgcgcattgcgcaaatgtgcctgtgtgagttttgtgtggatatcaccagtatgaaagtcgccgagcgcaccggcagcagcgataaactgctggcagtggctgactggcggcaaagcccgctctttagcgatgaagaacggctggcgctggagtacgccgaagccgcaagcgtaacgccgccaacggtcgatgatgccctgcgtacccgactggctgcgcattttgacgctcaggcgctcaccgaactgacggcattgatcggcctgcaaaatctgtcagcccgttttaattctgccatggacattcccgctcaggggctgtgccgtattcctgaaaaacgttcttaaggagagatgatgcgccattgtgggtggttgctgggattgttatcgctgttttctctggcaacacatgccagtgactggcaagaaattaaaaatgaggccaaagggcaaaccgtctggtttaacgcctggggcggcgataccgcaattaaccgctatctcgactgggtgagcggcgagatgaaaacccattacgctataaacctgaagattgtccgtctggcggatgccgcagacgcggtgaagcgcattcagaccgaagccgcagccggacgtaaaacgggcggctcggtggatctgctctgggtgaacggcgaaaacttccgcaccttaaaagaggccaatttattacaaacgggctgggcggagactctgcccaactggcgctatgtcgacacacagctgccggtgcgggaagatttttctgtgccgacacaaggtgcggaatcgccctggggcggcgcacaactgacgtttatcgcccgccgcgatgttacgccacagccaccacaaacgccgcaagccttactggagtttgctaaagccaatcccggcacggttacctatccgcgcccaccggactttaccggcacggcgtttcttgaacagttgctgattatgctgacgcccgatcccgccgcattaaaagaagcgccggacgatgcgactttcgcccgtgtcactgctcccttgtggcaatatcttgatgtgctgcatccgtatttgtggcgcgaaggaaaggatttcccgccttcacccgcgcggatggatgctctgctgaaagccggcacattgcgcctgtcgctgacctttaaccccgcgcatgcgcagcaaaaaatcgccagcggcgatttgcctgcaagcagttacagttttggctttcgcgaggggatgattggcaacgtgcatttcgtcaccattcctgccaacgcgaatgccagtgctgcggcgaaggtagttgccaatttcctgctctcacccgatgcgcaactgcgtaaagcagatcccgctgtctggggcgatccttctgttctcgatccgcaaaaactgcctgacgggcagcgcgaatcattgcaatcaagaatgccgcaggatctgccgccggtactggctgaaccgcacgcaggttgggtaaatgcgctggaacaagaatggctacaccgttacggtacgcattaatctttttgctgtgggcgatggtggcggtgatttatgcaccgctgatcccggcagctctcacgctgatatcgcctgctttgtcgttgacacactggcaggcgttatttgccgatccacagttaccgcaggcattactggcaacgctggtgtcgacaaccatcgcggcggtcggggcattgttgattgccctgctggtgattgtggcgctgtggcctgggccgaaatggcagcgtatgtgcgcccgtctgccgtggctgctcgccattccccatgtggcttttgccaccagcgcccttctgctctttgctgacggagggctgctttatgactatttcccgtatttcactccgccaatggaccgatttggcatcggtctgggcctcacccttgcagtgaaagaaagcgcatttctgctgtggatcttagcagcagtattgagcgaaaaatggctgttgcagcaggtcattgtgctggattcgctgggctacagccgctggcaatgcctgaactggctgctgttgccctccgtcgcgcctgcgctggcaatggcgatgctggcgattgttgcctggtcgctgtcggtcgtggatgtggcaattattctcgggccaggtaatcccccgacgctggcggtaattagctggcagtggttaacccagggcgacattgaccaacaaacaaaaggcgcgcttgccagcctgctgttgatgctgttactcgccgcctacgttttgctgagctatctgctatggcgcagctggcggcgcactattccccgcgtagatggcgttcgcaagcctgccacgcctttattgccgggcaatacgctggcgatttttttacccttaaccggtgtgctgtgtgtggttctgctggcgatcctcgcggatcagtcgacgatcaatagtgaagcgctcatcaacagcctgacaatggggctggtggcgacattcatcgctttgctcctgttactgctgtggctggaatgggggccacagcgtcgccagttgtggctatggttgcccattttattacctgctctgccactggtggcgggccagtacacgctggcgctatggctgaaactggatggaagctggacggcggtggtctgggggcatctgctgtgggtgatgccgtggatgctgtttatcctgcaacccgcctggcagcgcattgattcacggttaattttgattgcgcaaacactgggctggtcgcgggccaaaatcttcttttacgtgaaatgcccactcatgttgcgccctgtgctgattgccttcgcggtgggatttgcagtcggtattgcgcagtatatgccaacgctgtggctgggcgcggggcgttttccgacgctcaccactgaggcggtggcattaagcagcggcggcagcaacggtattctcgccgcccaggctttatggcaactgctattaccgcttattatttttgccctgaccgcgttagtcgcaaaatgggtaggttatgtcagacaaggactccgctaatgctctgcgtgaaaaatgtttcgctacgtttaccagaaagccgcttgctgacaaacgttaactttacggtggataaaggtgacattgtcacgttaatggggccgtctggctgtggaaaatccactctgttttcatggatgattggtgcactggccgaacagttttcttgtacaggtgagctatggctcaatgagcaacggattgacatcctacccaccgcacagcgtcagattggcattctttttcaggatgcactgttatttgaccagttcagtgtcgggcaaaatttactgctggcgctaccggcgacacttaaagggaatgcccgacgtaatgccgtgaatgatgcacttgagcgttcaggccttgagggagctttccatcaggatcctgccactttgtctggcggtcagcgagcgcgcgttgctctactacgcgcccttctcgcccaaccaaaagcgttactcctggatgagccattcagccgtcttgatgtggctctgcgcgataattttcgccagtgggtgttcagcgaagttcgcgccctggcgatccccgtcgttcaggtaacgcacgatctccaggatgttcctgctgatagttctgttctggatatggcgcagtggtcagaaaattacaacaaactgcgataacgcaaagtttttctcaatgcgtcagttcagaatggcgcactcaaaactacaatgtcgggattttcgatgaaacgtgtttctcaaatgaccgcgctggcaatggctttagggctggcttgcgcttcttcgtgggccgctgaactggcgaagcctcttacacttgaccagcttcaacaacaaaatggcaaagcgatagatactcgccccagcgcgttttataacggctggccacaaaccttaaatggcccttctggtcatgaacttgccgccttaaacctctctgccagctggcttgacaaaatgagcaccgaacagctcaacgcgtggatcaagcaacataacctgaaaaccgatgctccggtggcgctgtacggtaatgacaaagatgtcgacgccgtcaaaacgcgactgcaaaaagcaggtttaacgcatatctccatcctgagtgacgcgctaagcgaaccttcccgtctgcaaaaactgccgcattttgagcagctggtttatccgcaatggctgcacgacctgcaacaaggtaaagaggttacggcgaaacctgccggtgactggaaagtcattgaagcggcctggggcgctcctaagctttaccttatcagccatattcccggcgctgactacatcgataccaacgaagtggaaagtgaaccgctgtggaacaaagtttctgatgaacaactaaaagcgatgctggcaaaacacggcattcgccatgacaccacggtcattctgtatgggcgtgacgtatacgctgcagcgcgtgtggcgcagattatgctttatgctggcgtgaaagatgtgcgcctgctggatggcggctggcaaacctggtccgacgcgggactgcctgttgagcgcggaacgccaccgaaagtgaaagcggaaccggatttcggcgtgaagatcccggcacaaccgcagttgatgctcgatatggaacaggcccgtggactgctgcatcgccaggatgcatcgctggtgagcattcgttcgtggccagaatttatcggtacgaccagcggttacagctatattaaaccaaaaggtgaaatagccggcgcacgttggggacacgctggtagcgactcgacgcatatggaagattttcataacccggatggcaccatgcgcagcgccgatgatattaccgctatgtggaaagcgtggaatatcaaaccagagcagcaagtttcattctactgcggcaccggctggcgcgcgtccgaaacctttatgtacgcacgcgccatgggttggaagaatgtttccgtgtatgacggcggctggtacgaatggagcagcgatccaaaaaatccggtagcaaccggtgaacgcggcccggacagtagcaaataacattgcaattactgacgctggagcgacttcagcgtcagatacccactccacacccgcgtaaaggtcgtcatccagcacaacgcaccgaagatccacgcaaaccacgcaaaccatgcagggaataaacatcccagcacaaacagtaagatcgtttctgtgccttcggttaatccccccagatagtaaaacgacttatgtgcataaccggggttatcaatctgatgttttgctgccagtgcagcaaaggcgagaaaactgctgcccgtgccgataaacgcaaacaacaaccagccgcctgccagcgcattttgctccggtgcagcaagaataaagccaaacggcaccagcgcgtaaaagagaaaatcgagagaaatatcaagaaagccgcccgcgtcggtaagctctctgcgccgcgccagcgcaccgtccagaccatcaagcagcctgttcaacaaaatgacgactagcgccgccagataccagcccagcgccagaaacggcagagccagcacgccgatggcaaatcccactaatgttaaaccatctggcgtaatgcccggtttatcaagaacccgcacgcactgatgcaacaacggtttaatccggggatgaagatggcggtctagcacaggcactccttaaatataaagcctttctgattgagcaacagtgcggatattatggcatttttcgcttatctgcccgtgtgtaatttatgaaaatgattgaagttgttgccgccatcattgaacgtgatggcaaaattttactcgcgcaacgccccgcccagagcgatcaggcgggattatgggagtttgccggtggtaaagtcgagccggatgaaagtcagcggcaggcgctggtgcgtgagttacgcgaagaactgggcatcgaagcaactgtgggtgaatatgttgccagccatcagcgagaagtttcggggcggattatccatcttcatgcctggcacgtacccgacttccacgggacgttacaggcacatgaacatcaggcgctggtctggtgctcacctgaagaggcgctgcaatatccgctggcccctgctgacattccattattagaggcgtttatggctttacgcgccgccagaccagcggattagtgctaagggttttgtcatcacgctggcattgcagcagtattccttcggctttaattaccgccccttcagaataattttgatcctgataaacgcagcactgagtacagggctgcgctgactgcccgcctgaactgaacacttctggcggtacgtttacctccacgtccggacgataatgcgggttagccagtgcaattaatggaaatgctaatactacggcgaacaatgctcgactcacagggaactccttaacgttattgtctctgctactgataacggtagccgggtggcaaaactttagcgtctgagttatcgcatttggttatgagattactctcgttattaatttgctttcctgggtcatttttttcttgcttaccgtcacattcttgatggtatagtcgaaaactgcaaaagcacatgacataaacaacataagcacaatcgtattaatatataagggttttatatctatggatcagacatattctctggagtcattcctcaaccatgtccaaaagcgcgacccgaatcaaaccgagttcgcgcaagccgttcgtgaagtaatgaccacactctggccttttcttgaacaaaatccaaaatatcgccagatgtcattactggagcgtctggttgaaccggagcgcgtgatccagtttcgcgtggtatgggttgatgatcgcaaccagatacaggtcaaccgtgcatggcgtgtgcagttcagctctgccatcggcccgtacaaaggcggtatgcgcttccatccgtcagttaacctttccattctcaaattcctcggctttgaacaaaccttcaaaaatgccctgactactctgccgatgggcggtggtaaaggcggcagcgatttcgatccgaaaggaaaaagcgaaggtgaagtgatgcgtttttgccaggcgctgatgactgaactgtatcgccacctgggcgcggataccgacgttccggcaggtgatatcggggttggtggtcgtgaagtcggctttatggcggggatgatgaaaaagctctccaacaataccgcctgcgtcttcaccggtaagggcctttcatttggcggcagtcttattcgcccggaagctaccggctacggtctggtttatttcacagaagcaatgctaaaacgccacggtatgggttttgaagggatgcgcgtttccgtttctggctccggcaacgtcgcccagtacgctatcgaaaaagcgatggaatttggtgctcgtgtgatcactgcgtcagactccagcggcactgtagttgatgaaagcggattcacgaaagagaaactggcacgtcttatcgaaatcaaagccagccgcgatggtcgagtggcagattacgccaaagaatttggtctggtctatctcgaaggccaacagccgtggtctctaccggttgatatcgccctgccttgcgccacccagaatgaactggatgttgacgccgcgcatcagcttatcgctaatggcgttaaagccgtcgccgaaggggcaaatatgccgaccaccatcgaagcgactgaactgttccagcaggcaggcgtactatttgcaccgggtaaagcggctaatgctggtggcgtcgctacatcgggcctggaaatggcacaaaacgctgcgcgcctgggctggaaagccgagaaagttgacgcacgtttgcatcacatcatgctggatatccaccatgcctgtgttgagcatggtggtgaaggtgagcaaaccaactacgtgcagggcgcgaacattgccggttttgtgaaggttgccgatgcgatgctggcgcagggtgtgatttaagttgtaaatgcctgatggcgctacgcttatcaggcctacaaatgggcacaattcattgcagttacgctctaatgtaggccgggcaagcgcagcgcccccggcaaaatttcaggcgtttatgagtatttaacggatgatgctccccacggaacatttcttatgggccaacggcatttcttactgtagtgctcccaaaactgcttgtcgtaacgataacacgcttcaagttcagcatccgttaactttctgcgatagcagcagatatgccagtaaagaaatcccatttgactatttttttgataatcttcttcgctttcgaacaactcgtgcgcctttcgagaagcaagcattatataatgccaggccagttcttcttcaattgtcccgttttgaaaagctgtgcttgatatcgagatcatccatgataattccgccgcccatattagcttcgccgaggatttaccggagctatgattagcgcaatcagagatatagtctgagggaaaaacagcaaatttattcaacaaggcgataacctgctctggggcttcctccatgtttgctttaaaggtattggctccatggtcgccagaaagaaaatgctccattaaggcacaataactttcgctatcttcgataccccattgatcctctaaagactcgcgtcttttacttatgatatcgatcgagtcaaaaggaagcacatgatattggaaggtatctttgccaggttcaggctttcgcggccagaactccagcgtttcagaccattgcttatgatagaatcgataaggtgcgatcaattgtagcgcctgtaacttctcgatactgagcggctcaatacctttagcctgataataatgcagttgttctttttttgctttaaaaccggcccgaacaataagccccatcataattaatagataaagaaaagagcatcccgcggtaatcaggcctctttcattcaaaccgttggatgttatcgctgcgaacacaaacattacagcgacaacacatgttaaataaaacccccacttacaaagcagcatggccttattttctttaatcatccgttcaaaattactattaaatatttcccagccattaaaagaatacttctcgctcccaggatggttttgtaataaaacttttttcatcacattccctgttattacatactttagaggcgataattttatccatgcaaaaaaaatatccaacgaattttcttgatccgctggatatttcagaatatgactcgaatagcacgaaagattcactcgcttacgctatcgccccgcttccgacttcatctgctggcggactttttttcgcactacgtttacgcggtgcagcctttttcttatcagcactgccaccactgcccggagccacaatgccgcgaaactgccgcaccggcgtacgtttggcttgatcaataagctgatatagcgtccccaccagcggctgcataaagtcctgatagcgacactgcttttcgctgatttgcgtcagcaccgattcccagtgcgcggtcatgtccggtcgcgtcgccatctccggcagcgaatggaatagcgcttttccggcgtcggtggagtggatatagcgcccttttttggtcaggaaaccacgcttgaacaacagttcaataatcccggcacgcgttgcctctgtccccagaccatcggtcgcacggaggatctttttcagatctttatcctgcacaaagcgcgcgatcccggtcatcgccgaaagcagtgttgcatcggtaaaatggcgcggcggctgggtttgccgctctaccacttcacctttttcacacagcaactcatcgcctttcgccaccacaggcagtggcgtgccgtcgttttcttcatcgcgctctttgctgcctaacagcgtgcgccagcctgcttcagcaagaaaacgcgctttagcgacaaatttgcctttggcaatgtccagttcgataacacacttgcggaacaccgcatccgggcagaattgcatcagatactgacgggcaatcaggttatagaccttcgcttcgttctccgtcaggttgatcgcagaactccgtgcggtcggaatgatggcgtggtgcgcatcgacctttttgtcatcccaacagcggttgcgtatatctggatctaccactggctgcggcaacagatccggtgcatgaacactgatggcattcatcaccgcgtggcgtccggcaaaatgttcttctggcaaatagcgacaatcagaacgcggataagtgattagcttgtgcgtttcgtacagtttctggcagatatcaagcacgttctgcgcactcagaccaaaacgttttgccgcttcaatctgcaacgctgaaagcgaaaaaggcagcggcgcggattctgattcccgtttatcgttatagctggtgacaatagccggttgaccactaatgcggttaaccacatgctccgccagtggacgatgtaacaagcgcccttcttcatcctggtacggttcacacgcttcgctcggttgccagatagcggtaaaccgctcatcggcaggtgtcacgatatgtgctttgacttcaaagaagtctttcgccacgaagttttcaatctcttcatcgcggcgcaccaccagcccaagcacgggcgtctgcacgcgtcccacggaaagtacgccctgataaccggcattgcgaccgagaatggtatacgcacgggtcatattgatgccgtacagccagtcggcacgcgctcgcgccagcgcagaaacgcacagcggtacaaactcactgttggaacgaagacggtcgatcgcccgctcaaccgcctgcgggttcaggtcgtttatcaagcaacgctgtacctgctggcgcttttccggtgccagttgcagatagtccagcacttcatccaccagcaattgcccttcacgatccgggtccccggcgtgaacgatttcgctggcttcatgcaggaaccgtttgatgacgttaagttgtttggtcacggagggtcggggctgtaattgccacttttccgggacaatcggcaaatccgcaagattccagcgcgcatagcggctgtcgtaggcgtctggctgcgcctgctcaagcaggtgaccgatacaccaggtcaccacctgaccattaccgcactcgataaagccatcgcctttccggtgcggtttgggcaggacatcagcaatggcgcgcgccagactcggtttttcggcaataaacaaccgcattgaattaacgaatctcaaccatggcacgaccgccgcgcgctggcaccagttcgccaattgccgtcagttcaatgccaaactcggcggctgtagctttgacctcattttctgcttccggcatgaccgccagcagcaaaccgccagaagtttgcggatcacacagcagatcgcgcacttcacgcggcatttcacccatcagatgaccgtagctggcaaagttacgttcagtgccgccaggtactgcgcccaacttaatgtactcttcaacaccggggagtttcgggatcgcttcatagtcgacgcgtgcctgcacaccagccccctgacacatttcgctcaagtggcccagcagaccaaagcccgtaacgtcggtcatcgcttttacgccttcgatgttggcaaaggacgcgcctgcgatgttcatccggcacatcacttccgtcgccagtccctgatgttctggtttcaacagtgattttttctcagccgtggtaagaacgccgatccccagcggtttcgtcaggaacagtttgcatccggcttgtgcggtactgtttttcttcacccgctcggtcggtacgatccccgttaccgccagaccaaaaatcggctccggcgcatcgatggagtgaccgccagccagcgcaatacccgcctgacgacatgcatagcgtccaccttcggtcacttcgcgggcaatttctggggaaagtttgttaatcggccagccgaggatcgcaatcgccataatcggtttgccccccatcgcgaagatatcgctgatggcgttagtcgccgcaatgcggccaaaatcgaaaggattatcaacgatcggcataaagaagtcggtggtactgataacgctggtgccattgcccagatcgtacaccgccgcatcgtcgcgggtttcattacccacaagcaaattcggatcaacaaacttcgcctgctcactatgcaggatggtttccaacacttttggggaaattttacagccgcaaccagctccgtggctgtattgggtcaaacgaatcgagttctcgctcatggacatctcctgtcaatgcaatccgggtatggtaaccctcattccgtgaagtgataagtgagagtgtctgaattcctgcgcctttgctcacaatccagacagtttcgcgacaattatcagaaataagttacaaacggcgtcgggtccgggacgttaatcgacgtagatgctttcagctgcggcgtaccgaggtagagaaaaccgacaattttatcctgctcacggcaaccgaatgcttcacgcactaccggactttcagttaatgcgccactgcgccagatgccgccaaacccctgggcaactgctgccatttgcatcgccatgaccgcgcatccggcagacatttcctgttcccagcgcgggactttatgattctcttcgcatttcgccaccaccgtgatgatgagcggtgcgcggaacggcgcattacgggctttgtcgatagctttgtcatcactaccggcagcaatcgccccctgttccagtacggcgctgaaacgctcgcgcccttccccttcaatcacaaaaaaatgccacggttgcatggacttatggtccggcgcacgcatacccgcacgcaggatgttttgcagttgttcacccgttggcgcgggttcagccaagcgggaggcgctacggcgattgatcaatagttcgagtgcatccatttgattaactcctgtcgtgatatttattcacaaaattaacacgagagtggattttgttacagcacagtccgcaattcctgctgacaagtaccggttgggtcattacgataaccacatctattgcgcctgtgacaggtgtgaccttaagttgggagaatacatgcgaaccctttggcgatttattgccggattttttaaatggacgtggcgtctgctgaatttcgtccgtgaaatggtacttaacctgttctttattttcctcgtactggttggtgtggggatttggatgcaggtcagtggtggtgattcgaaagaaacggccagtcgtggcgcactgctgctggacatttctggtgtgatcgtcgataaacccgacagttctcagcggtttagtaaattaagccgccagctgcttggtgccagttccgatcgtctgcaggaaaactcactgtttgatatcgtcaacactattcgccaggcgaaggacgaccgcaatatcaccggtattgtgatggatctgaaaaacttcgcaggcggcgaccaaccgtctatgcagtacatcggcaaagctctgaaagagtttcgtgacagcgggaaaccggtttatgccgttggcgagaactacagccaggggcaatattatctcgccagtttcgccaataaaatttggctgtctccgcaaggcgtggttgatctgcacggctttgccaccaacggtctgtactacaaatcgttgctggataagctgaaagtttccacccatgtgttccgcgtgggtacgtataaatctgccgttgaaccgtttattcgtgatgatatgtcaccggcagcccgcgaagctgacagccgctggattggtgagctgtggcaaaactatctgaatactgttgccgctaaccggcagatccctgctgagcaggtattccctggcgcgcaagggttgcttgagggtttaaccaaaaccggtggcgataccgcgaaatatgcactggaaaacaagctggtcgatgcactggcatcgagtgcggaaatcgaaaaagcactgaccaaagaattcggctggagtaagactgataaaaattatcgcgccatcagttattacgattacgcattgaaaacgccggcagataccggtgacagcatcggtgtcgtctttgctaatggcgcaattatggatggcgaggaaactcaggggaatgttggcggtgataccactgcggcacaaatccgcgacgctcgccttgacccgaaagtgaaagcgattgtcctgcgtgttaatagcccaggcggcagcgttaccgcgtctgaagtgattcgcgctgaactggcagcagcccgggcagcgggtaagcctgtggttgtatcgatgggcggcatggcggcatctggtggttactggatttccacgccagctaattacattgtggctaaccccagcaccctgaccggttctatcggtatcttcggcgtgatcaccaccgtagaaaatagtctggattcgattggtgttcatactgatggtgtctcaacttcaccgctggcggatgtttctatcaccagggcactgccgccggaagcgcagctgatgatgcagttaagcattgagaatggctataaacgctttatcacgctggttgctgatgcgcgtcattcgacgccggagcagattgataaaattgcccagggccacgtctggaccggtcaggatgcaaaagctaacgggctggtcgatagtctcggggatttcgatgatgcggtcgccaaagcagcagagctggcaaaagtgaaacagtggcatctggaatattacgttgatgaaccgaccttcttcgacaaagtgatggacaacatgtctggttctgtccgggcaatgttgccagatgcgttccaggccatgttacctgcaccgctggcctcggtagcctctaccgttaaaagtgaaagtgacaagctggccgcgtttaatgacccacaaaaccgttatgcgttttgcctgacctgcgccaacatgcgttaagtcttgtactgagtggccgacagatcgtcggccacattattttttacgtcgacgaatcctcttcccgctgtttcgccccatatttccttatccgcatagtatcaggtgcgctccccctgcctcacgtatatacttttgctctttcgatatcattcatatcaatatcatgcaaaagaaatcaatttacgttgcctacacgggcgggaccatcgggatgcagcgttccgagcagggttatataccggtgtcaggtcatctacaacgccaactggcgctgatgccggaattccatcgcccggagatgccagatttcaccattcatgaatatacgccgctgatggattcttcagatatgacgccggaagactggcagcatattgctgaagatattaaagcgcactatgacgactatgatggttttgtcattctgcacggcaccgacacgatggcgtataccgcctctgcgctgtcgttcatgctcgagaatctcggtaaaccggtcattgtgacagggtcacaaatcccgctggctgagttacgctctgacggacaaattaatctgctgaatgcgttgtacgttgcggcgaattatccgatcaacgaagtaacgctctttttcaataaccgattgtatcgcggcaaccgcactaccaaagcccatgccgatggttttgatgcgtttgcctctccaaaccttcctccgttactggaagcaggtatccatattcgtcgtttgaatacgccacccgccccgcacggtgaaggggaattaatcgttcatccaatcaccccacaaccaattggcgtagtgacgatttatccagggatttctgctgacgtcgtgcgcaattttctgcgccaaccggtgaaagcattgattctgcgctcctatggcgtgggtaatgcgccacaaaacaaagccttcctgcaggaattacaagaagccagcgatcgcggtattgtggtggtcaacctgacacaatgtatgtccggtaaagtgaacatgggtggttatgccaccggtaacgccctcgcccatgccggcgtaattggcggtgcagatatgactgtagaagccacgctaaccaaactgcattacctgcttagccaggaactggatactgaaaccattcgcaaggccatgagccaaaacctgcgcggcgaactgacgccggatgattaaggagactgtaatgccccctcgcgccctgttactggtcgatttacaaaatgatttctgtgctggtggcgcgctcgccgtgccggaaggtgacagtacggtggatgtcgctaaccgcctgattgactggtgccagtcgcgcggtgaagcggttatcgccagtcaggactggcacccggcgaatcacggcagttttgccagtcagcacggtgtagagccttatacgccaggccaactcgacggtttgccacaaaccttctggccagatcactgtgtgcagaacagtgaaggcgcacaattacatccgttactgcaccaaaaagcgatcgcagcggtgttccataaaggcgaaaatcctttagttgacagttacagtgccttttttgataacggccgtcggcagaaaacctctctcgatgactggttacgcgatcatgaaatcgatgaattgatcgttatgggcctggctactgactattgcgtgaagtttaccgtgctggacgcgttacagttaggttataaggtaaacgtgattaccgatggttgtcgtggcgtgaatatccagccccaggacagtgcgcacgcgtttatggagatgtcagcagctggggcaacgctatatacgctggcagactgggaagagacacaggggtaattttacgctggcctacaattctgtactggcattgtaggccaaataaaacacgtcagtggcacatctggcaattgatgccatcaacgaaagatttaattcacctcagaaatctcttccaacgacaccttccgcgtttcgatgccaaaaatggagagaaccagcgcacagagcaataacataacaccaagtaccataaacaccgtgatcgacccataatgtgttaataatgccgcaacgccatagggcgtgaagactgcgacgatccgtccgacggcattaacgaaacccgaaccgcgcaggcgtaaatgcgttggccaaagctccgggatataaaccgccgacgcgaagcaaacatacatgtataaaaagaagatcatcaccagtccatagattaaaatcgcccactctgtagtctgaattgaatagatatagcctaacacggcaataataataagtaaggtggagccaaataaccgacgaggaaaatgatcaataattaatgccgcaataaatattcctaccggagcgccaatcataataacagcggtcattaatattgatttatcgacatcaatgccggagttaacaaatatggtcggtatccatacggtgatggtataaagcgaaatgttcattgcaattaaaacagtaatcgcgactaatgtacgtcgtaacatttcacctttaaacaggagccagaaagtacccttgattactttaaccttgctgttgctctgatacgaagtaagcgggggtaaacgaatactcttctctctttcaatttgctgctctacttcacgaagttggcattctgcacctgcgatttgccctttccctgccagccatcgtggcgactcgataaagtatttacctgagagaaaccaggctaacagtatgccaataccacccagcagaaacattattcgccaactaaaaaaagcgataaccaccacgcctatcgccgcagacagcatgggcgaccagttaccaacaaatgagagccgcgcggaccattttccacgcaccgtcgcggggataaactccgtaaatgaggcatagccaaccataatcagcgcccccattcctgttcccatcaggaagcgaaagaagatgagccagtacatatcagggacaaaagcggcccctgttgcagcaataccgacgatgagaagatttatgcgaaacgccctgcgccgcccaaagtagtcaccaataaacccaccagtaagtgagccgatgaaataaccaaacattaatgccgaggtaaaggcggcattgaggaaattatttgaccatccattgcttaccagctttgctaagacgacattaccggagtaactcaaaaaccctgttaataacagactaaagcttataataccaaatatacgataatgaaaccgggccaaaggcaagcggtccagtcttgcgccaatttgatcatattgttccattaggtgcctcggatttgctaaaaaggtagcaattgcggcaaattcacttgccgcatctttatcatcattttatttcaaggcgcaggaacaaataatattgacaacgtgtgcttaaattaccacaccagctggatattattgtctttgcaaaatgctatccactctgcacccggtgatttatcagttattatgtaattaatatgactaaaatcagctaactggacaaaagctttgcgatcaaacttagagtgatcaaccaataacgcaacttctgtcgcctgacggatcattgtctttttgatttcagcttccgcttcattagagtccagcgcgccgctgttaatatcaagacctttacaactcattaccatgatatcgacatgatagcgcctgatgatctctttagtaattcttccttgcagtgaaagtgtatttttgtttagttccccacccgttgaaacgactttaatttctgactgagccagaacatgaatcgcttccgccgagttggttagcaacgtcaggccactacggtcctgtaacaatttgagcaattccattacggtactactggaatcggctgccatggtggttttattgtcgataaagggtagtgccttgcgtgcaataagctgcttctcttcataaaacgatgaagcgcgcttataaaaatggatattctccgtcaacatcgctgtatttaaaacagcaccaccataggttctggtcaaaaagccttcatcttccagcttctcaagatcgcggcgaatggtttcttcggttacctgaaaaatcccactcaaatttgagactgtcacctttttatcgttggcaaccatttgcttaattgcctgaatcctgtcttttgccgccacgattacacccctgtatctttttacatcacattagcgcgattatcgcataaccgatgtttactttcaaaataacctgtttgaatcacagattttcatcacagttttcacagaaacagaggtgaatcgtgttgagtatttaacgctccagggcctctgccatttccctcatcaatgttgcgtctgcatccgataagttgatattcagtgccgcgacattttcgcgtacctgttccggtgcagtagccccactaagaatggagattaaatcactctgttttaatatccacgccagtgccagagtgggaattgtgcactgataacgagcacaaagtggctgccactgttcaagcatatcaatcactttcagcatgttttcacgctggaaccagactttatttgcccgagcgccgcccggaacgtaatcacgagtgatggtgccggtcaacaatccctgctctagcggggaataaacctgaaccacaatgccattatcacgacatagtggcagcagttcgttttccattgcccggtcgaggatactgtatttcgcctgaataatatccagttcaccatattgcagatactcgcggatatggtcagcatcgacgttagcagcgcctatagcgcgaattttcccttcagactttaactcattaagcactgcgacagtttcagcgatcggcgtaaaaaatggcggcaccgactgccagtgcgtcatgtagatatcgatgtaatcaatacccagacgttgcaagctcgctgctacctcttcgcggatagattccggggaaaggtttttatacaactgccgatcgccaactttgttgaataaacttccttttcgttcccagacaatgccgcatttggtttctactacaacctgttcacggggcagtttttttaacgcctgaccgacgataacttcactattgccaaagttatatcctggcgcagtatcaatcagattaatgccacaacgatgggcttcaagaatcgtatcaatacatatttgccgatcgagatcgccattccatgcaggaccgccgccaatggcccatgtccccaaccccattcgcgaaagcgtaatatccgttgtgcctaaaggtatctttttcatttgccttcattatccttcgtattcttccagcaattgttcgaccagctttctgttttttacgccggtggtggcaccgacgcttagaaccgagatagccgccgttgcattggcaaagcgtgcgcattcacgcagatttttgccttctaacagtgccgcaataaaacctgaagcaaagttatcgcccgcgccaatggtgtcgatggcggttattcctgcgaccgccggcaccttcatcgtcatgtcaccacgcttgataaagcagccgtctttacccgttttaatcaccaccgtttttacgccgcacgcaagaaagcagtcagcaatttcatccagtgtctctttcccggtgagtaattttgcctcggcaaaattaggaaacagataatcgacataactcaatgcttcgcaaatatcatccagcgtttcattcaaccgcggtttgatcatatcggcacagataatcatctgccgggctttagcttgcgtaaaaatttctgttagcgctttaccatccaatagtggactgttgaaaatactggccagtgataataatttcgcctgagaaaaccgcgcaaaatcaacatcgtcaatattcaatttccacagactgccattacggtttgtgacaaacgtccgctcgccatcctccgtcaccagtccaacgttaatagaggtatctatgctgacgtcctgcttcaggctttgaatatcaatattctctttgcggcaatggtcgagaataaattgccctgcggcatctttaccaatacgactcattaatgctgtgcgatggcccagacgagaaataattgttgcttcatttattgcatcacccccggtggtcattgcgattctttcaagaggataagaatccacatcaaagatatttttactgaccggttgcaatggaatatcaacaatagcggcacctatacaaataacgtcgagattatccatatcattattccgctttgccatcagaaccgaacagtttaattttttccaatgcccgttcttttacagctttacgtacttcacgttctaaatgcaggaaaggctgatcctggttttctttcactgcaaccattgcggcctgacagagctccgtatgaatgttgattttcgcgatacccaacgaaattgcagttttaatgtcggcatcactgatccccgatgcaccgtgcaaaaccagcggaacagaaacggcatcgcgtacgcgtttgacgacctcaaagttcaattgtggctctgacgtataaaccccatgctggttgccgatggcgacagccaatgaatcacagcccgtacgttcaacaaattcagccgcctggtcaggatcggtatagtgatagcccgccagcgcttcctcataaacggtttcattaccgacatgccctaattccgcctctaccggaatacccagcggatggaagaaatcgacagcctctttggttaaacgaatattttcttcgaaatcaaacgcggaagcatcacgcattaatgaattcataccatgagtccaggcgttatgaataatctccatactccgaccatgatcccaatgagttattaccggcaccgttgctttttgtgccattgataccatcatgtgagagaaatcttcaaatgaggtgttaccgacaaaacctgtaccaaaagaaataataaccggggatttcgcttcttcggctgcgtcgataacgcccatcaacatttctgcattccatacgttaaaatgggcaattgcataatgtttatttgtggcatcgttttcccaatatctgatatctgcgagcatgttctgttctcccgtattaattaatcgctaattttaataacgcctttaataatgtcgcgtttgttgttaactgactcttcaaatgcctgttgtacatcccgataatcgtaaatatgcgtcaccatcgatttcacatcgaatcgccctgaagaaatagcttcaatcgtgaccggataacgattggcatagcggaataccgtctggatagtgacttcgcgattgattttgaggaaattgattgccgaatcgccgggtacagtaccaacaatcataattttaccgccgcgcattaccagataaggtgcctgtttaacggtgaccgcagaacccgctgtttcgaaaacaatatctgcgcccatgtcttcggtaaattgctgacagcgtgcaatagtgtcttcttttgcgccgttaataaccactgtcgcaccaagctgttccgccattgccagacgtttttccagcacatcaacgacggcaatttccgttgctcccaggcatttgcacgcttgcaacgtcatcaaaccaatacaacctgctcccagaataattatcttcttacccggtttaacatctgccagcatcgcggcatgcatcccgactgcggcaggctccaccagcgccccttccatcgtgtccatattgtcgggcagtttgtaagtaaagctctccggatgacacagatagtgcgttaatgcgccgcggtagttgggttgtgtcgccataaaatcaacgtccgggcagatgttatatttgccttccagacagtaacgacagtgaccgcaaggaacgccaggttcgatatttacccgatcccccggtttaaatttgcgcacgcggcttcccacagccacaaccgtcccggcgcattcatgacccaggccaatttcttgatttgggtctttaggcggaataaacgggcctgattcaaaaccatgtacatctgaaccacaaataccgacatattctactttaatcaaaacttcatcttctttaggcactggtatttctgctgaaataattttcattgtgcccggcacctgcaatattgcttttgaatttttcattttgaatccacccgtattatttattggctactgcatcaatacttaaactttcaacggagacacctttggtttcgattccaatggtggcgatagcaattgcgacaataattgaaaccgcccccagaagaataaagactcccgtaacgccataactactgagcagcactgcaacggcataaggtgcggcaataccactgattcgccctaccgcattcgccagaccggagccacggagtttggcctctgtcggccagatttcagggacatacactgccgaggcatagcaaacgtacatatagacgaaagtaatcaggaagaaaccaatcaacgttatgagcaacatactggtttgcagtgaatagatatatccgagcaccgcaatcaggattaatagccccacacccattgttttacgcggaattttatccatcaccagcatggcaataaaaataccaaatggcgcgccaaacatactcatggtatttaaaacaatcgagtcttttaaattaatcccctgggtcatgaatattgttggcaaccagttaattagtgtgtactgcacaacgttcatggcaatcagcacacaagagcctaatatcacgcgtttcagtaatactcctgtcagtaaggctgaatacggcaccgcttgtggcgctttaccgtcatcagcaataaccacaggcggcaaaggtttacccgtctggcgtatgacgccttcttctatactccgcatgactttctcggcttcctgataccgtccgcgcgattccagccagcgcggggattcaggaaagtagcgccaggccagcgccgtagcgataagcgacaatattgcagggataagcagttgtacccgccagttccactctgcactaatcagcggcgtgagtcccatcgctatcaatgaacagagcggatatgaccagttgccaataaaggaaacccgacttgaccacgttccacgatttctaccgggcatatattcggtgaaaccagcaaacagcgtaaccagtaaagctcccagcccaactcccatcacaaaacggcaggcaataaggaaatccatattcggtgagaaagcaccgacaaccatcgaggcaatatgaatggcctcatagaggatgaacgcatttctgcgaccggttttgtcgccaatgatgccgcccaccagcgcaccgagaaacattccggcggtcgtgattgctgagaatgtggctgtggtggaattatctgtccagcccaacgctttcagctgcgcgaggatcaagccaccaacggcattactccagcagacaagcaagccaaacgcgacgatggcaaacattgatgaatgccagcggcaatccggtaagcgatccagccgtgcaccacaatgcggttttgttatctgttccatgcgataacgttccttcaggagagtggttattcatcaaagtcgtaagtcatgatcactttgattgcggttttatcgaccatcgcatcaaacccttcgcgccattgcgacaggccgatacgatgcgtgatcatcggtttgactttgatagcgccgctggctaatagcctgatagcgttacgccatgaggtggagtcataggccatatgcccaatgatgcttttgttccaggcggtaatgtcattaatcgagaaatcaagaggtttgaagcccattccaacgcgtaccacttccccgttcgggcggagcatttcgatggcttgtttcagtgcgatattggcaccggagcattcaatcaccagtcccagattgtctttgccacaaatttgctggcagcgcgccaccacatcttcggtagaaccatttactactgccgtcgcacccagttcttttgcaaccgggaagcggaccgccacatcttcttgcagaccaacgacgacgatatttaccgcccccataattcgcgccatttgtacggagaacagcccgagtgggccagtgccgatgacgaccacatcctgaccaggaaggaatttcgattgctgcgcgatggatttgtaggcattacagatagggtcaagtacggctgcgtcctcataatcaacaccatcagggatttcccacaacgcatgacgatgaattttgagaatttcaccaggaaccagacaatatttggaaaaaccaccgccccaggtattattatccagaccaaggtttactttttctgtacaacacagaaaatcaccttgttcacaggccggacaaacaccgcaaacgtgaccgctgttatccgatacgacgcgttgccccactttccagtctttgactttttcaccaacctgcgcaatacaacctgcgaactcatggccgcggatagagttaaactcatcagaaccgctatcgacattgtagtgcttcatgtctgcgccgcagattgccgcggctttaatttcaatcactacatcttccgggccacacatgggttgtgggacatcaatcatcttgtagccgccaaaggccttgccaaaccgagccagtgctttcattgcgtcatcctctgtgtttagttttgcttagatggccatcatacttacccacatgatttttgaggtcaacattaaatctgtaaaacacagataatgatctgcgttttacaactcagatcacaattacgcagaaaatggctgggtctgttacaggttgatggaaggcggggcgcaaaaagagcaaattcgagagggattaccggccaaataggtctgagacttaagttcaggagaagtcattcaggtgtgaacgggacggcaagagatcggactgggacttagccaggtcatggcgagataattgagatgagtcgtggggtcattgttggctatccccttcatagccgaggcaaaaaggggatgaaccacttacttaaacatggcaataggctttgctgagataccaaaatcttcttttaactgctgtttgctcttcatgaccatctgaccatttgtgtcaattgtcatatgctgtgcttcgatattatggcgggcttgccacagcatcaccagttgcaggcagttctctttttgttcctcggtcaacgcaacgccatcaggccatttccccagttcaacggcggtcgacaaacgctggtatacctcaggcatcatgctgttgataatgtcatcaagattcataatttttccgctcctgtggaataagttgctgaatcgttttttcaaccgttgatttcttcgccgttttcgccatcggtaaagcgtaaagaggcagagttaacacaataacgttcgcccgttggctgcggcccgtcggggaagacatgccccagatgggcatcacagttaccgcaacgaatttctatgcgctgcattccatgtgacaagtctttgatataacgaatggattcttcacttaccggttcgtagaaactgggccagccacagccggaatcatacttggtttgggaatgaaacagcggggcatcgcagatcaaacagtgatatacgccgtcacgcttgttatgcagtaaacgacccgtaaatggcggctctgtcccatgattctgcgtcacgtaaaactgcatctcggacaaattttttttcagttcttctgccgaaggtttattagccatttgctcacatctcactttaatcgtgctcacattacgtgactgattctaacaaaacattaacaccaactggcaaaattttgtcctaaacttgatctcgacgaaatggctgcacctaaatcgtgatgaaaatcacatttttatcgtaattgccctttaaaattcggggcgccgaccccatgtggtctcaagcccaaaggaagagtgaggcgagtcagtcgcgtaatgcttaggcacaggattgatttgtcgcaatgattgacacgattccgcttgacgctgcgtaaggtttttgtaattttacaggcaaccttttattcactaacaaatagctggtggaatatatgactatcaaagtaggtatcaacggttttggccgtatcggtcgcattgttttccgtgctgctcagaaacgttctgacatcgagatcgttgcaatcaacgacctgttagacgctgattacatggcatacatgctgaaatatgactccactcacggccgtttcgacggtaccgttgaagtgaaagacggtcatctgatcgttaacggtaaaaaaatccgtgttaccgctgaacgtgatccggctaacctgaaatgggacgaagttggtgttgacgttgtcgctgaagcaactggtctgttcctgactgacgaaactgctcgtaaacacatcaccgctggtgcgaagaaagtggttatgactggtccgtctaaagacaacactccgatgttcgttaaaggcgctaacttcgacaaatatgctggccaggacatcgtttccaacgcttcctgcaccaccaactgcctggctccgctggctaaagttatcaacgataacttcggcatcatcgaaggtctgatgaccaccgttcacgctactaccgctactcagaaaaccgttgatggcccgtctcacaaagactggcgcggcggccgcggcgcttcccagaacatcatcccgtcctctaccggtgctgctaaagctgtaggtaaagtactgccagaactgaatggcaaactgactggtatggcgttccgcgttccgaccccgaacgtatctgtagttgacctgaccgttcgtctggaaaaagctgcaacttacgagcagatcaaagctgccgttaaagctgctgctgaaggcgaaatgaaaggcgttctgggctacaccgaagatgacgtagtatctaccgatttcaacggcgaagtttgcacttccgtgttcgatgctaaagctggtatcgctctgaacgacaacttcgtgaaactggtatcctggtacgacaacgaaaccggttactccaacaaagttctggacctgatcgctcacatctccaaataagttgagatgacactgtgatctaaaaagagcgacttcggtcgctcttttttttacctgataaaatgaagttaaaggactgcgtcatgattaagaaaatttttgcccttccggtcatcgaacaaatctcccctgtcctctcccgtcgtaaactggatgaactggacctcattgtggtcgatcatccccaggtaaaagcctcttttgcattacagggcgcacaccttctctcgtggaaacctgcgggtgaagaagaagttctgtggttgagcaacaacacaccgttcaaaaatggcgtcgctattcgcggtggcgtaccggtttgctggccgtggtttggtccggcggcacaacaaggtctgcctgcgcacggttttgcccgcaacctgccgtggacgctgaaatcacatcatgaagatgctgatggcgtagcgctgacttttgaattgacgcaaagcgaagagacgaaaaaattctggccgcacgactttacgctgttagcgcatttccgcgtgggtaaaacttgtgaaatcgatcttgaatcacatggcgaatttgaaaccacctctgccctgcatacctactttaacgtgggtgatatcgctaaggtaagcgtcagtgggctgggcgatcgcttcattgataaagtgaatgacgcgaaagaaaatgtactgaccgatggtattcagaccttccctgaccgtaccgatcgcgtgtatctgaatccacaagattgcagcgtgattaatgatgaagcgctgaatcgtattatcgccgtaggccaccagcatcatctgaacgttgtcggctggaacccgggaccggcgctttcaattagcatgggcgatatgccggatgatggctacaaaacatttgtttgtgtagaaacggcttacgcttcagaaacgcaaaaagtgaccaaagagaaacctgcacatctggcgcaatccattcgcgttgcgaaacgttaatttacgttaatgttgtgtgccgggtgcaatgcatccggcacacaacatcacaccatatccagcgcagtttttccttttggtgccggatatgccttatccagcatagctaattccgctgaagaaagttcgacctcaagcacagccgcattttgttggacatgggcaatcgtggccgcttttggaatcgccatcacaccctgatgactgatcacccacgccaacaatacttgtgccgcgctgatattgtgagcatgtgcaatttcgttgactaccgcgttttttaacagtccattgcgcaaccgcccggcctgggctaacggactgtaagccatcaccggcatctgctgttgctggcaccaggggagtagatcgtactcaattcctcgtgaaccgagatggtaaagcacctgattagtggcacactgatttccccccggcagctgccagagttcctgcatatcagcataatcaaggttagaaacgccccagcggcggatttttccctgggcgatcaatttttccatcgctgcgacagtctcttcaaaagcgaaactgccagaccagtgtaataagtaaagatcgagataatcagtattgagacggcgtaaactggcttcgcatgcatttatcgctttttgcccgccagcattccacggatagactttagagacgagaaagaccttctctcgcagaccggttaatgcttccccaaccaccttttcggcaccgccatcggcatacatttcggcggtatcaatgagggttaaaccgagttcaatgcccgcgcgtagtgcagcaacttctgttttgcgctgactggcatcttcgcccatataccatgttccctgccctacggctggcagtgagacatcgccactaaattgaatcattttttgttgcattgtttcctcccaggtattgcaccaccgtaatgcaaaacagggcgtgacgccctgtttttatgcacaaaatgccctggaaagatgcattatcagaatttgtaggtgatcccggtagaaatcaggccagtccaggatttatccaccatcgggctgtcagtaacttcatcagacagacgggtgtagcgtgcggtaccgtaaacactccagtcgccgaggaagttgtagctggcgctcagctccaggtaagggctccagctgtcgttcgggttatagccacgcagaccgctgcgagcggactctttgcgcgatacgccataatagtattcgttctggttttcgctgttccactgcacaccaatacccggagtcacggtcaggccaccgttggtgtaacgatacaaccaggccatatcccagacgatgccgttgctgttatccagggtatcgccagccagggtggtacgcaggtaaccgtactgggtaaagtgagcataagacagaccagccatcatggtgctcttacggtcatccaggtgacgcatttggtgatcgccactgtctttcgctttgaagtaaagcggcgaccagtaagcggtaattgaaagtttatccgttgcgtcattccacaggtagtaaccaccacctaagccacggaaccagaagttatcgccttcatagttgattaccggtactgggtaaacatcggtatcgtaatctttatatgggtgttcaacgacacctacgcctgcgcccagggaaaatttaccttcagcgtgcgctacgcctgcagacgttgcgataagcactccaagtgccagaagtttgagtttggtcacaattaatcattccttaaacaaatgtttagcgggcgacaaagtttacccgtcaatacatcgaaacccaacctttttacgttttcattttttaaagtaactgtttaattttcctgacgcggatgacaccgcgcttacagccaaatgaatttagcgttactggcgagcctggtctttacattaattatgcaaaatttatggatgagttgttgatatgccattgaaattaagaaagccgtgcaggcaagttttccatttgccatctacgcttaattttgaaggtgtatcaccgggcacgttgttctcatcgtcgataaaatggcatgagagttgctgtgttttagcaagagacgtcgttcagtttacctcttccgggagcctctactattcatatgaacggctcttaacctgtgctaaaaaacgaaaggacggcataccatgaatatattcgatcactatcgccagcgatatgaagctgccaaggacgaagagttcacactgcaggagtttcttaccacttgtcggcaagatcgcagtgcttatgccaacgcggctgagcggctattgatggctatcggtgagcctgtcatggtcgatacagcccaggaacccagactttctcgactcttttctaaccgggtcattgcacgttatccggcgtttgaagagttttacggcatggaagacgcgattgaacagattgtctcttatctgaaacacgcggctcaggggctggaagagaagaaacaaatcctgtatctgctggggcctgtgggtgggggtaaatcatcgcttgctgagcgactgaaatcattaatgcagctcgtaccgatttatgtattgagcgcgaacggtgagcgtagcccggtcaacgatcatccgttctgtcttttcaatccgcaggaagatgcgcagattctggaaaaagagtatggcattcctcgccgttatctcggcaccatcatgtcgccgtgggcggcaaaacgcctgcatgaatttggtggcgatatcactaagttccgggtagtgaaggtctggccgtcaattctgcaacaaattgctatcgccaaaacggaacccggcgatgagaacaaccaggacatctccgcgctggttgggaaagtcgatattcgtaaactcgaacactacgcgcagaatgacccggacgcctacggctattccggtgcgctgtgccgcgccaatcaggggatcatggaattcgttgagatgtttaaagcaccgattaaagtgctgcatcccttgttaaccgccactcaggaaggtaactacaacgggacggaaggtatctccgccctgccgttcaacgggattattctcgcacactcgaacgagtccgaatgggtcactttccgtaataacaaaaacaacgaagccttcctcgatcgtgtttacatcgtgaaggtgccgtattgcttgcgcatttccgaagagatcaaaatctacgagaaattgcttaatcacagtgaattgactcacgccccatgcgcccctggcacgctcgaaacactgtcacgtttttccattctttcgcgcctgaaagagccagaaaactccagcatttattcaaagatgcgggtttatgatggcgaaagtctgaaagacaccgatcccaaagccaagtcgtatcaggaatatcgtgactacgccggtgtcgatgaagggatgaacggtctgtcgacgcgttttgcgtttaagatcctctcccgcgtgttcaacttcgatcatgtagaagtggcagcaaacccggtccatctgttctacgtcctggaacagcagattgagcgcgagcagttcccacaagagcaggcagaacgctatctggagttcctgaaaggttatctgatcccgaaatatgccgagtttatcggcaaagagatccagacggcctaccttgaatcctattccgaatatgggcaaaacattttcgaccgttatgttacctacgcggatttctggattcaggatcaggagtatcgcgatccggataccgggcagctgtttgaccgcgagtctcttaacgccgagctggagaaaatcgagaaaccggcggggatcagtaatccaaaagatttccgcaacgagattgttaacttcgtactgcgcgccagagcgaataacagcggacgcaatccgaactggaccagctatgaaaaactgcgcacggtcatcgagaagaaaatgttctccaataccgaggagctgttgccggttatctcgtttaacgccaaaacgtcaaccgacgagcagaagaaacacgacgactttgtcgaccgtatgatggaaaaaggctacacccgtaaacaggtgcgtttactgtgcgaatggtatttgcgcgtacgtaaatcgtcttaacaaccctggcccggtacacatgttaccgggcctacaacgacagcgaaccgtgggcctgagaagcggcaacacaggcgtagcatacagttggcaaatgtagtacggggggcatatgacctggtttattgaccggcgtctgaacggcaaaaacaaaagcatggtgaatcgccagcgttttttacgccgttataaagcgcaaattaaacagtcgatctccgaggccattaataagcgttcggtgactgacgtcgacagcggcgaatccgtatccattcccacggaagatattagcgaaccgatgtttcatcaggggcgtggcggtctgcgccaccgcgtgcatccgggcaatgaccatttcgtccagaacgaccgaattgaacgtccccagggtggcggcggaggttccggcagtggtcagggccaggccagccaggatggtgaaggtcaggatgaatttgtctttcagatttcgaaagatgagtatcttgatctgctctttgaagatttggccttaccgaatctgaaacaaaaccaacaacgccagctgaccgaatataaaacgcatcgggcgggttataccgctaacggcgttccggccaatatcagcgttgtgcgttcattgcagaactcactggcgcgacgcacagccatgacggcaggcaagcggcgggaacttcatgcactggaagagaatttggccatcatcagcaacagtgaacctgcgcaactgctggaagaggaacgtctgcgcaaagaaattgcagaattacgtgccaaaattgaacgcgtcccttttattgacaccttcgatttacgttacaagaactacgagaagcggcccgatccctccagccaggcagtgatgttttgcctgatggacgtttccggttcaatggatcaatccactaaagatatggctaagcgtttttatattctgctgtatctgttcctcagcagaacgtataagaacgtggaagtcgtatacatccgccatcatacccaggcgaaagaagtcgatgaacatgagtttttctactcgcaggaaacaggcggcaccattgtttccagcgccctgaaactgatggatgaggtagtgaaagagcgttataacccggcacagtggaatatttacgctgcacaagcatcggacggcgataactgggccgatgactctccgctttgccatgaaatcctggcgaaaaaattattacctgttgttcgttattacagctatatcgaaattacccgtcgtgcacatcagacattgtggcgagaatatgagcatctgcaatctactttcgacaactttgcgatgcagcacatccgcgaccaggatgatatttatccggtgttccgtgaactgtttcataaacaaaatgcaacagctaaaggctaaaactatcagccaggtcattatcgcctggctgatttttagcttactgtaaattatctcatttattacatacattagcttacaatcgctttaaatatgacagcataacctttacataatttagttccagaaaacaatcattcggaaaaatgattcagtcaacacgtatttccatggggttattctttaaatattttttatcgttaacgaaaattgatcctggtcaaaactatatatctctgccatcaataaaatccagcactcacattgctctcctttttatggtttctatgggtacacaaaaattaaaagctcaaagcttttttattttcagtttattgctgacgttaattttattttgcattactaccttatataacgaaaacacaaatgtaaaactcatcccacagatgaattacctgatggttgttgtggctttgtttttccttaacgccgtcatttttcttttcatgttaatgaaatatttcactaacaaacaaattttaccaacactcattttaagccttgcatttttaagtggccttatctatttagttgaaaccattgtaattatccataaaccaattaacggcagtacactgatccagacaaagtcgaatgatgtttctattttctatattttccgccaactcagttttatttgtttaacctcgctggcgctcttttgttatggaaaagacaacatccttgacaacaataagaaaaaaacgggaatcctgttgctggcgctgatcccttttttagtttttccccttctggcacacaatctgagcagttataacgctgactattctttgtatgtcgtcgattactgtccggacaaccatactgcgacctggggaatcaactatacaaaaatattggtttgtctgtgggcatttttactgttctttattatcatgcgcacacgattagccagcgaactatggccgttaatagcattattatgtctggcatcgctatgctgcaacttacttctactgactctggatgagtataattatactatctggtatatcagtcgcgggattgaagtttccagtaaactgtttgttgtgtcttttctgatttataacatttttcaggagctgcaactctccagcaaactggcagttcatgatgtgctgaccaatatttataatcggcgctactttttcaacagcgtagagtcattattgtcgcgacctgttgttaaggacttctgtgtcatgctggttgatattaatcagttcaaacgcatcaatgcccaatggggacatcgtgtgggtgataaagtgctggtttcaattgtcgatattatccagcaaagcatccgccccgatgatattttagcgcgactggagggtgaggtgtttggcttgctatttaccgaactcaatagtgcccaggcaaaaatcattgcggaacgtatgcgtaaaaatgtcgaactcctgaccggctttagtaacagatatgatgttcctgaacaaatgaccatcagtattggcacggttttttcaacgggtgacacgcgtaatatctcgcttgtcatgacggaagcagataaagccttacgcgaagcgaaaagcgaggggggcaacaaagtgattattcatcatatttaagtgcaaaaatattcagagccatgctttttgcgtggcttttgcatacaatttattactattacccctaaatttcccctccccagcggcgcagagatgagtataattagcgcccctgtgccaggccgcaatcgaactttatctggttttctcgtttcactaaccgaaggagtgccatttatcatgaaattgcaccatagaatgctccggcattttatcgccgcaagtgtcattgtgctgacatcttccttccttatttttgaacttgtcgccagcgacagagcaatgagtgcctatctgcgctatatcgtgcagaaagcagactcctcctttctttatgataagtatcagaatcagagtattgccgcgcatgtgatgcgcgctctcgctgctgagcagtcggaagtgtcgccagaacagcggcgcgccatctgcgaggcttttgagtctgccaataacacccatggcttaaacctgactgcccataaatacccgggcttacgcggcacactacaaaccgcatccactgactgcgacacaattgtggaagctgcagcactattacccgcttttgatcaggcagtggaaggcaaccgccaccaggatgattacggttcaggtcttgggatggccgaagagaaatttcactattatctcgatctcaatgaccgctatgtctatttttatgagccggttaatgttgaatactttgcgatgaataactggtccttcctgcagtcaggaagtattggcatcgatcgcaaagatattgaaaaggtatttaccgggcgtaccgtattgtcgagcatttaccaggatcagcgtactaaacagaacgtgatgagtttgctgacgccggtatatgtcgcagggcagctaaaagggattgtgctgctggatattaacaaaaacaatctgcggaatatcttttatactcatgaccgccctctcctctggcgttttctcaatgtcacgctaaccgataccgattcggggcgcgacattatcatcaaccagagcgaagataatctgttccagtatgtcagttacgtccatgacttaccgggcggcattcgtgtctcgttatccattgatattctttactttatcacgtcttcgtggaaaagcgttctgttctggattttgacggcgttaattttgctgaatatggtgcggatgcacttccgtttataccaaaatgtgtcgcgagaaaatattagtgatgcgatgactggactgtataatcgcaaaattttaacccctgaactggagcagcggttgcagaaactggtgcaatccggttcttcggtgatgtttattgctattgacatggacaagttaaagcaaataaatgacaccctcggtcatcaggagggggatttagcgattacgttattagctcaggcgattaaacagtcgattcgtaaaagtgattatgccatccgactcggtggcgatgaattctgcatcattcttgtcgattcgacgccgcaaattgcagcacaactgcctgaacgtatcgaaaaacgtctgcaacatatcgcgccgcagaaagagatcggcttctcttccggtatttacgcgatgaaagaaaacgatacgttacatgatgcgtataaagcttccgatgagcgtttatatgtcaataagcagaacaaaaacagccgttcatgataaccttctgtggttgtttgcttgtaatctcaggagcgtgaaatgactgaaatggctaaaggaagcgtgacgcatcagcggttaatcgctttattatcacaagaaggtgctgacttccgcgtcgttacccatgaagcggtaggtaaatgtgaagcggtgtcagaaattcgtggcaccgctctaggccagggtgctaaggcactggtatgtaaagtcaaaggcaatggcgtaaatcaacatgttctggcgatcctcgcagccgatcaacaggccgatctgagccaactcgccagccatataggcggattacgcgcttcgttggccagcccggcggaagtcgatgaactcacaggctgtgtcttcggcgcgatcccccctttcagcttccatccaaaactcaaactggttgccgaccctctactcttcgaacgatttgatgaaatcgccttcaatgcaggcatgctggataaatccgttattttgaaaaccgcggattatttgcgcattgcgcaaccagaactggtcaatttccgccgcactgcgtaactagccggtccgttcgataagaagaacggacaaaaccagtacaacagcaatggcaaaaaacgatgacgtgataatcagtgtctcgacaaacatttgatcgttcatagcatgcccccgggagatagctgttttcacgttattgttagcgtgcacaaatggcagtttgatgacagttcgcctgattttttatgcaaaaaacgtaaagattttctacttccttcctgcagcaagcgtaaagtaagcaggcttattattttttggcaaggaaaccacgatgtttgatgtcactttgctgatcctgctcgggttagctgcgctgggctttatcagtcataacaccactgtcgccgtttcaattctggtgttaatcattgtccgcgtcacaccgttaagcaccttttttccgtggattgaaaaacaggggctaagtatcgggataatcattctgacgattggcgttatggcccccatcgccagcgggacgctaccgccctcaaccttgattcactcgtttctgaactggaaatcactggtggcgattgcagtaggcgtgattgtctcctggctgggtgggcgcggcgtgacgttaatgggcagccagccgcaactggtcgccgggctgctggtaggcactgttttaggcgtagcgctgtttcgcggcgtaccggttgggccgcttattgccgcgggtctggtttcgctgattgtggggaaacagtagttaatctcgcaatatatcggcctggcgtttgccccaggcctttcttaaacatagtaataaaggccgttgttgaatcataccccagcgtatgagcaactttctgtacagtatcgcctttcactaatccctgaagcgccataatcagctgtaactgctgacgccactggcgaaaactcaaccccgtctcttttactatcagtcgggcaagattgcgttcactcatcgcaaaaaagccagcccattgccccaatgccccccactcgacaggccctttcgccatcatctccaccatcgtgcggattttaggatgagaagaaacgggcaggtgcagctgttgttgtggctgctgagggagttcatcaaacaggacctgaattaatctgcgggtcattggctcagcacgctgagtcgtcgtcctgtttgccagggttaaaattaattcccggcataagggcgatattttcaatgtgcaacatgttgtcggcattgtcactgcgctgggttcgataaacagaaaacagagttcagcattagctgttacttgattgctatgttccaccccgcccggtatccaaaccgcatattgtggcggcaccatccacaaagcattttccaccgtacaggtaattgcaccatgtagcgccagtatcagctgtcctttgcggtgctgatgtacaggactggttaactcatccgttccggcgtgaatacaaaatgcgaccgcggcttcatggtgtcggtcgggttcatagccattgagattcaacctgtgcatcattttgtccgaacttagcgataatttgtcattttagcttgattcaacataacaataaaaacggtaaggtacagcctcgtttgtaacaatgagaagcatatgacctgttcaacttcattaagcggcaaaaacaggattgtccttatcgctggcattctgatgattgccacaacattacgcgtcacctttaccggcgcagcaccgttactggatacgattcgttccgcttactcgctgacgacagcgcaaaccggcttattgaccaccctgccattattggcctttgcgctaatctcacctttggctgccccggtagcgcgacgttttggtatggaacgtagcctgtttgccgcgttacttttgatctgtgctggtatcgcaattcgctctctcccttcgccttacttattatttggcggtacagcggtcattggcggtgggattgcattaggcaatgtcttactgccaggattaattaaacgcgatttccctcattccgtcgccagacttaccggcgcatattccctgacaatgggagctgcagcggcactgggatcggctatggtcgtgccgctggctttgaacggttttggctggcaaggcgcgttgctcatgctgatgtgttttcctctgctggctctttttttatggctgccacagtggcgaagtcaacaacatgcaaatttgagtacctcgcgcgccttacatactcggggtatctggcgttcaccgcttgcctggcaggtcacattgtttcttgggatcaactcactggtctattacgtgattattggctggcttccggcgatcctcatcagtcacggctatagcgaagcacaggcgggttcactgcatggtttgctgcaactagccacagcagcacccggtttgctgatcccacttttcttacatcatgtgaaagatcagcgtggtattgcagcgttcgttgccttgatgtgcgcagtgggcgcggttgggctctgctttatgccagcgcacgcgatcacctggactctgcttttcggttttggttccggcgcaacaatgatactggggttgacgttcattggtctgcgggctagttctgcgcatcaggcggcggcactctcggggatggcacaatccgtcgggtatttgttggcagcctgtgggccgccgctgatgggtaaaatacacgatgctaacggtaactggtctgtaccacttatgggtgttgccatactttcactactgatggcgattttcggactttgcgccgggagagacaaagaaattcgctaatatccggtgctatagtgacgtaacaaatcatgcgtgaaagggagaacaaacacgatgaatattcagtgcaaacgcgtttatgatccggctgaacagagcgatggttatcgcatactggtcgaccgcctctggccgcgcggtatcaaaaaaaccgatttagcccttgatgagtgggataaagaaatcacgccgtcaacggaactgcgcaaagcctttcacggcgaagtcgtcgattatgcaacctttcgcgagcaatatcttgcagaactggcgcaacacgagcaagaaggaaagcggctggcggacatcgccaaaaaacagccgctgaccctgctctactcagcaaaaaacaccacgcagaaccatgcgctggtgctggccgactggctacgtagcttgtgattttagtacagcatccggcggttatttttcaccagccggatggtcacgccgccacaatgcccattcatcaatcgtttcaccgcccggtaatttgcaattgttgctgaccccttgcgctgtctgcactggaatgagcgtcccgcccttctgctggcaatagaccgacgccggatttgccataccaatctgcggcggtttaggtgcttctggctgagaaggggttgaacaaccagccaggaccagcaagcaaggcagaacaaaactgataattttcatttattgatctcacatatttatccaagattagagtatcgcggtatcgttttgttttgcagcactatttttattacattcactcaaaacatattacgtcttgtttcatctttgttgatgatgttttatcatgcctgcaaagattaaataatcagcatttacccgccgtatcctggagttgttccgtgtcagatcagattatcgcccgcgtctcgcaatcccttgccaaagaacagtcactggaaagtctggtccgacagcttctggagatgctggaaatggtcactgatatggaatcaacctacctgaccaaagtggatgtcgaagcgcgcctgcagcatattatgtttgcccgtaacagccagaaaatgtacatcccggagaattttaccgtctcgtgggattactcgttatgcaaacgcgccattgatgaaaactgctttttcagcgatgaagtccccgaccgttggggtgactgtattgcggcacgcaatcttggcatcaccacatttctgagcacgccaattcacttaccggatggatcattctatggcacgctttgcgccgccagcagtgagaagcgccagtggagtgaacgcgcggaacaggttttacagttattcgccggactgattgcacaatatattcaaaaagaggcactggttgaacagctgcgcgaagccaatgctgcgctgattgcgcaatcgtataccgactcgttaaccgggctaccgaatcggcgggcgatttttgaaaatctgacgacactgttttccctcgcccggcatcttaaccataagataatgatcgcgtttatcgatctggataacttcaaattaatcaatgatcgttttggtcataatagtggcgatctgtttctcattcaggttggcgagcgccttaatacgctccagcaaaatggcgaagttattggtcgtctcggcggtgatgagtttttagttgtttcactaaacaacgagaatgcggatatttcgtcgctgcgagaacgcattcagcagcaaatacgtggagaatatcacttaggtgatgttgatttgtattatcccggtgccagtcttggcatagtagaagtcgatcctgaaacaaccgatgcagacagtgccctgcatgctgccgatattgcgatgtatcaggagaaaaaacacaaacagaaaacaccttttgtcgcgcatccagcgctacattcctgaggcgtattcacatccttttgattggtgataacatgcgaatcggtattatttttccggttgtaatcttcattacagcggtcgtatttttagcatggttttttattggcggctatgctgccccgggagcataaagatgaaaaaaacaacgattattatgatgggtgtggcgattattgtcgtactcggcactgagctgggatggtggtaacgtcacctctaaaaaatagcaaaggctgcctgtgtgcagcctttgtgcaatttaagcgttaacttttaatcttcctgtagataaatagcacgacaatcgcaccaataacggcaaccacgaagctgccaaaattgaagccatcgactttaccaaagccaaacagcgtgctgatccatccgccgactacggcaccgactatccccagcaggatagtcataaagaatccacctccatctttacctggcatgatccacttcgccagaataccggcaataagcccaaaaataatccatgacagaatgcccattgtttcctcacttatctgttttgcattagcgggttagtcgctgataaaaagcatagcacaacatcgggagggcaagatttgtgacgagcatcacggaggttttttttgcgatggcgcagaaattgcgccatcaacgatcagtgataattaccaaccacaaacatcatgttcgttttccgtgtcataagaacgtacggtattcaccagatcttttatcacttcagccgccacttctggcaccagcaaagtcatcggcgtctctgtttcataatcgacagaaacgccattgctgttattggtgacggtcacggtatacgttgctttgcccatgattcatttcccgttatgaatgactttccgttgttgcgcaccttccatcaggacttcaggagccacgaagaagtcaatgttgaaataagtatcgtcagtcatggcttcaatgttgtgccacttttctggagggaacaccgcaaactgccccgcttcgataaggatcacctgatcaggctctgcactgtgttcatcagcgtagccgagatatttgaccgccccatgcataacggaaaggcgtgggtaaacccccgggcgcgttcctttatcaagatgacgttcgaatattccggcaggtgcagtttgtttattccagaaaggcgttgagcgcgtatgaatataattctgtgggatttgaagcatccttttccctccttcggtgaatgcgctgaaaacggtttattccagccgtttcagggtacgcctgataatttgcattttaaataccatttattggttactttttagcaccatatcagcgaagaatcagggaggattatagatgggaagcccgcgacaacgcgggctgaaagcatcaggattgcagcgtcgccagtcgggcagcgaaacccacgaacatcaaaccaatcagtgagttgccaactttagccagtttctttttggtacgtatgtactgcgtgacaaaagcaccagatataatcaggaagctcaaatagcagaaactcaccagttccagcgtcgccgccagaataaagaatgaaattcccgtatgtggggcattaacatcgataaactgtacgaaaaacgacacatagaacaaaatggctttcggattagtcaggctcaaaattaacgcgcgtttaaaaatagcaccgtattggggctcatcggatttggcctcgctatttttacccttcagggtcgcgtaaagaattttactccccagatagagcaaataaaacgcaccaagataacgtacaatgttgaataatatcggggtggtcttaattaatgtcgccactccagcccatgccagaaacatcaataccgcatcgccaataaatacaccgcaggccgcaagataaccgcctttcataccgctactgacgctatttttgagtacaaacagggtatttggccctggcaccaacacaataaaaatggccccaaccagataggtccagtaattcagaaccccgtattcagcgaacacattaacctctttaattatctttcgatcatgcgcgattaaaggtgaatatgctaaccaatctgtagcggcttagaaaggagaaaatcaggttttaacctgatatcaacccgataattgaatcattaatcaggcatgctccagtgaaaaattcgggtagtgctcggcaaaatactggcgtaaaaattctaccgttatccgcactttcgctgacgtcgccagccttgaaacataaacggcccagacgttcgctggctggtaatattccggtagcacttgcactaaatgaccactggcaatgttttcgctaacatcccaccaggaacgcagagcaatcccctgcccatcgagacaccactgatggacaatttctccatgattagacgacagtgggccggtgactttaatcgcatgggggccttctttattgcgtaattgccagacaccaaaaggatgatcgcgctctttaatgaccaggcacggcaatgcagaaagatcggttaaatgtttcggcgcgccatgttgcgcaataaattccggcgacgcgcagagaatacggtaattggtcgccagtttgcgggcgattaaattaggggcgatgtcatcgccaatgcgaatatcgagatcgacaccttcattgaccaaatcgaccagtcggtcttccacatcaaaacgtaattccagttgcggatacgccttcgccagcgctaataacgccggagccaccacctgtcgtccaaaaccaaagctgctgataatacgcagcatcccctgcggcacctgacgcacgtcagaaagttcgtccatcatctgaccgacatcctgcaaaatccgctgcgcccattcataaatccgctctccttcttcggtaatggtgacgcggcgggtggtgcggtgtaacaacaccacgtttagcgtttgctccagcaaggcgatgcgcttgctgacgaacgccggtgaaacgcccagttcttccgccacggcggcaaaaccagcccggcgagccaccagcataaagacgcgcaaatcattcagcagcggtaaattattcatgattcgtgttttatgtttcaccagttacggggattaattccttttcagtcaattataggatggtgatgttgtcaattttgatggtcaggaagtgagaacccaatgatgaaaacgatgcgtattgctgcgatcccgggagacgggattggcaaagaagtccttcctgaagggattcgcgtgttacaggctgccgctgagcgctggggcttcgccttgagttttgagcaaatggagtgggcgagctgcgagtattacagccatcacggtaaaatgatgccggacgactggcatgagcaacttagccgtttcgacgccatctattttggtgccgtcggctggccggataccgttccggaccatatttcgttgtggggttcgctgctgaaatttcgtcgtgaattcgaccagtacgtcaacctgcgcccggttcgtctctttcctggcgttccctgcccgctggcgggaaaacagcctggcgacatcgatttttacgtggtcagggaaaacaccgaaggcgaatattcctcgctcggcggtagagtgaatgaaggtacagagcatgaagtcgtcattcaggaatcggtatttacccgccgtggtgtcgatcgcattttgcgttatgccttcgaacttgcgcaaagccgtccacgtaagacactaacttctgccactaaatcgaacggtttagccatcagcatgccgtactgggatgagcgagtggaagcaatggccgagaattacccggagatccgctgggacaagcagcatattgatattctctgcgcgcgttttgtgatgcagccggaacgattcgatgtggtggtggcgtccaatttgtttggcgatatcctttccgatcttggcccggcctgcaccggcaccattggcattgccccatccgccaacctgaatccggaacgcactttcccgtcgctcttcgagcctgtccacggttccgcgccggatatctacgggaaaaatattgctaaccctatcgccacgatttgggccggggcaatgatgctcgattttctcggcaatggcgatgagcgtttccagcaagcgcataacggtattctggcagcaattgaagaagtgattgctcacgggccgaaaacacctgatatgaaaggcaatgccaccacgccacaggttgccgacgcgatttgcaaaattattttgcgttaaggtcaaaccagtttatttgaaccgcgtcactgacgcggtttttttattcgttctttgcagtaaataacctgcgtcatttcaccttttattgtttccgtttcgtgttttatggctttccgtattcttaattgtttaatttatgtaacatgcaaattttgttacgcgtacgttaggttccgccgtacaggtattggttttgctggcaatgggactggtgatttatttagccaccagtaaatacggcaatattcgtcttggcgaaggaaaaccggaatacagcacgctctcctggctgtttatgtttatttgtgccggtttaggttcttctacgctttattggggggttgctgaatgggcctattattatcaaacacctggattaaatatcgcaccgcgttcacaacaggcactcgaatttagcgttccctactctttcttccactggggcatcagcgcctgggcaacttatacgctggcctcattaatcatggcttatcactttcatgtgcggaaaaacaaaggtctgagcctttccggcattattgctgctattaccggcgttcgcccgcaaggcccatggggaaaactggtcgatttgatgttcctgatcgccactgtcggcgcactgaccatttcccttgttgttaccgcagcaacctttacccgtgggctttccgcgctgaccggtttacccgataacttcaccgtgcaggcatttgtgatcctgctttccggcggcattttttgcctaagctcgtggattggtatcaacaacggtttgcaacgtctgagcaaaatggttggctggggcgcgttcctgctgccattactggtgctgattgtcggcccaaccgaatttattaccaacagcatcatcaatgccatcggcctgaccacgcaaaacttcctgcaaatgagcttattcaccgatccgcttggcgatggttcatttacccgcaactggaccgttttctactggctgtggtggatctcatacacccctggcgtagcaatgtttgtcacccgcgtttcccgcggtcgtaagattaaagaagttatctggggactgatcctcggcagcaccgtcggttgctggttcttctttggcgtaatggaaagctatgccattcatcagtttatcaatggcgtaatcaacgtcccacaggtgctggaaacactgggcggcgaaacagctgtacagcaagttctgatgtcgttgccagccggtaaattgttcctcgccgcatacctgggcgtgatgattattttccttgcctcgcatatggatgcagtggcctacaccatggcggcgaccagtacgcgtaatctccaggaaggtgacgatcctgaccgtgggctgcgtcttttctggtgcgtggtgatcactctgatcccgctttccatcttgtttaccggtgcttcgctggaaacgatgaaaaccaccgtcgtgctcacagcccttcccttcctcgtcattttactggtgaaagtcggcgggtttattcgctggctgaaacaggattacgccgacattccggctcatcaagttgaacattatctcccgcagacaccggttgaagccctggaaaaaacgccagtgctccctgcgggaaccgtattcaaaggcgacaactgagcgccatcatcctaacgataaaggtatccctatgagcaatctgagccctgactttgtactacccgaaaatttttgcgctaacccgcaagaggcgtggaccattcctgcccgtttttataccgatcagaacgcgtttgaacacgaaaaagagaacgtcttcgccaaaagctggatttgcgtcgctcacagcagcgaactggcgaatgccaatgattatgtgacgcgtgagatcattggcgaaagcatcgtgctggtacgcggtcgtgataaggttttgcgcgcgttctataacgtgtgtccgcaccgtggtcatcagttgttgagcggtgaaggaaaagcaaaaaatgtgattacctgcccgtatcacgcatgggcattcaaactcgatggcaacctggcccatgcacgtaactgcgaaaacgtcgccaatttcgatagcgacaaagcgcaactggttccggtgcgtctggaagaatatgccggattcgtcttcatcaacatggaccccaacgccaccagcgtagaagatcaattacccggcctgggcgcgaaagtgctggaagcctgcccggaagtccacgatctgaaactggcggcccgctttaccacccgcacgcctgccaactggaagaacattgtcgataactatctcgagtgctatcactgtggtccggcgcatccaggtttctccgactccgtacaggttgatcgttactggcacaccatgcacggtaactggacgctgcaatacggtttcgccaaaccgtccgaacagtcgtttaaatttgaagagggtacggatgcggcattccacggtttctggctgtggccgtgcacgatgctgaacgtcaccccgatcaaagggatgatgacggtcatttatgaattcccggtggattctgaaactaccctgcaaaactacgatatttacttcaccaatgaagagttaaccgacgagcaaaaatcgctgattgagtggtatcgcgatgtgttccgtccggaagatttacgtctggttgaaagcgtacagaaagggctgaaatcgcgtggctatcgtggtcaggggcgcatcatggccgacagtagcggtagtggcatttccgaacatggtatcgcccatttccataatctgctggcgcaggtgtttaaggactaatgacatcggcggcggtattttccgccgctgggctgatttttgatggagtacagcaatgtcagactatcaaatgtttgaagtacaggtgagccaggttgaaccccttaccgaacaggtgaaacgcttcacgctggtggcaaccgatggcaaaccattacctgcgtttaccggaggaagtcacgtcattgtgcagatgagcgatggtgataaccagtacagcaatgcgtattcactactgagttcgccgcatgacacctcttgttatcagattgccgttcggctggaggaaaactcgcgcggcggttcccgctttttgcatcagcaggtaaaagtgggcgatcggttaacgatttcaacgcctaataacctgtttgcgctaattccctcagccagaaagcatctgtttatcgcgggcggtattggtatcacccctttcctgtcgcacatggcagagctgcaacacagcgacgtcgactggcagctacattactgctcgcgaaatccagaaagttgcgcatttcgtgatgagctagtccagcatccgcaggctgagaaagtccatttgcatcattcatcaaccggaacacgactggaattagcgcgattattggcggatatcgaacctggcacacacgtttatacctgtggccccgaggcgctaattgaagcggtaagaagtgaagctgcgcgtctggacatcgccgccgatacgctgcactttgagcaatttgctatcgaagacaaaaccggcgatgcatttaccctggtgcttgcccgttccggaaaagagtttgtggtgccggaagagatgactattttgcaggttattgaaaataataaagccgcgaaagtggaatgtttatgtcgtgaaggggtatgcggaacctgcgaaacagcaatactggaaggtgaagctgaccatcgggatcaatattttagcgatgaagagcgtgccagccagcaaagtatgttgatctgttgttcgcgtgcgaagggtaaacgcctggtgttggatttgtagtttgccgaagccggatgtggcgctgagcgcgcccagtccggcttcggaagattttactgcggatattcctgcaataaattgtgtaatgcttccgccatcagctcaccacgccagccggaaatcagctccggcaaattgttctgcggtttcagtttccagtgccagttcagcagttggttgatttgccgacgcgatgccagcaattcggcgctgatcttatgcgtttcgctcacgtcagtaatcagcgacttaatcgctttaaacgctttacgataacccggcatgtccatcaggttaagcatcggctgcggtaaggcatcttccggcaatgtctgcgctttttccaccagcgctagcagcgttttaccgtgaaagcggatttcgctaccggataaacccaggctgtccagttcgcctaaacttcccggcatataacgcgctaccgaccacaaatgctcttcacgcacgacaaagttcaccgccagatcgcgctctcgcgccttgcgcagtcgccagtcggctaacagttgcagacaggccagttggcgtgtgcgtaattgccaggcattggtgatatcacgccaggcatcttccggcgcaacgacttcctgacgacgcatttgcatcaggcggcattcatccagcgccgcaggtagccagccggaggcctccgtttctaccataagcttggcggtgatcggtaacagataccagacatccgccgctgcgtattcacactgacgttcggtcagcggtctggccagccagtcggtgcgcgattcactcttgtccagcgtaacgccggaatactcttccaccatggaagcgaaaccccatgacatcgggcgtccgcagaaggcagcaaggatttgcgtgtcaatcaagggttgtggtaattcgccaaagacattgaggaacacttccagatcttcactgcctgcatggagaaattttgtgatggacggatcgcgcaggatcgctttcagcggtgaccagtcggtgatcccgagtggatcgattagcgccagatgctcgccatcgaaaagttgaatcaaccccagctgcgggtaataagtgcgcgtacgaacaaattcagtatccagggctatcgccggaaaggcacggacggcttcacacaaagaagccagcgcatcgtccgtggtaatcatttggtaattcaaattgttttctctttagtgggcgtcaaaaaaaacgccggattaaccggcgtctgacgactgacttaacgctcaggctttattgtccactttgccgcgcgcttcgtcacgtaattctcgtcgcaaaatttttccgacgttagatttcggtaactcatcacgaaactccaccagcttcggtactttgtatcccgtgagctgacggcggcaaaaagtcaccagtgactcttcggtaagcgatggatcttttttcactacgaagattttcaccgcttcaccactggagccggaaggtacgccaacagccgcgacttcctgtacgccaggatgctgcatgacgacatcttcaatctcgttgggatagacgttaaaaccggaaaccagaatcatgtcttttttacgatcgacaatgcgcaggaatccttcttcatccattaccgcgatgtcgccggtgtgtaaccagccatttttgatgatttcatcggtagcatcgggacgctgccagtaacccagcatcacctgcggtcctttgacacaaagctcacccggttgacctggtggtacttcattatcatcatcatccaccagtttggcttccgtcgacggcaccggcaaaccgatgctaccactatgataatcaatatcatatgggttaacgctgaccagcggcgcacactcggtaaggccatagccttccagcagatactgtccggtcagtttcacccaacgctctgccaccacttgctgcactggcatcccaccgcctgcggaaagatgcagactggagaaatccagctgctggaactctttattgttcagcaacgcattgaacaaggtgttaacgcccgtgatagcggtaaacggatatttcgctaactcttttaccaaccctggaatatcgcgcgggttagtgataagcaggttctgcccacccagttcgataaacagcaggcagttaatggtcagggcaaaaatgtgatacagcggcagcgccgtcaccaccagctctttgcccggatgcaacagcggaccataggtcgcgttaacctgttccaggttcgccagcatattgcggtgagtcagcatcgcgcctttcgccacaccagtggtgccgccggtgtattgcagaaaagctaaatcttccggcaccagttcgggtttgacgtactgcatccggtagccgttatgcagtgcgctacgaaatgaaatggcatctggcagatggtatttcggcaccaaacgcttgatgtatttaacaacgaaattgactaccgtgccttttgccgtagatagctgatcgcccatacgggtcagaattacgtgctgaacggcggttttatcaaccactttttccagtgtgtgagcaaagttagacacgataacaatcgccgatgcgccgctatcgttaagctgatgctcaagctcacgcggggtatacaacgggttaacgtttacgacgatcatcccggcacgcaaaatgccaaacagcgccaccggatattgcaataaattaggcatcatcaacgcaacgcgatcgcctttcttcagccccaacccttgttgcaaataagcggcaaacgcgcgactgcgttcttccagcttgcggaaggtcattacctcccccatattcacaaacgcaggttgatcggcgtagcgcgcgaccgactgctcaaacatatctaccagagattgataacggtcagggttgatctccgtcggaacgtccgcgggataacggttaagccaaaccttcttcaattcttcacctctaaaatgcgtgttcgtcgtcatcgcaaccccaaatgatatacatgccgttaacataatattaactcatcataccagcttgataattacccaacgaaaaggttgcgaagcgcgtcactatttatttttatctttaccgtaagaatgcagaaacagcggaccagccgctgtttctttttctttaaaaacaagcaattattcagttacaactgtttgtactctcgcggggccgggattataccagccccatccgccgtagccatagggccagccacgaccgccataaaaccatggatcaatcggctgaggcggcataatcacctgctgggttaaatgccaacgtttgtaacccgttacttgcatcaccataaatttatagggcgtattgccgattttgccgtcaaccgcaccagtgattggcccgactaccgtaaccagttgtccacggaaatccaccgggtccagaaaaccgttcacatcggcataaatgcgaccgcgagaaggttctcccagcgtcggtctggctccgctgtccagcggtacggtagcaatttccaggcgagttttcccttgctggttttgtaccgcaaccactttgccaccaaagcgtgcctcctgaccaacgtacagctgcggcgcactcatcacccgaactaaatcttgttgcggcgtgggactgctgcctttaatggcgtccggcacagtgacacaaccgctcagcattagcgcaaacgtacctgccagtatgcctttgataacattcttttgaaccgccatggtgcgactcctttttttctcagggcatactcttaagattcattctttgcccggaagtttcttccatgcgacgttgttacgtaaataaaccggttcggcatgttccaccgccaccgttttaccctcagcaaacatctgacacgcaatcggcagcatatcttcagcagcaggcagtaacacttcgccatcgcgcaaaaccagcccgctctctttaccgagatccggccaagcttgccagcccgtccctaccgtcacccattcgccggaaagctgttgcattcgttcatggacgatttcgggtttgagtacggcttcggtttcttcaccgtgccagataccgttttcatcacgctgatattcggcccagtaaacttcgcccattcgcgcgtcaatggctgccagcacgcgggttgcgccgtttttgcgccacgccccttgcgccatcgtcattagcgtggagacgccaatcatcggtaattccgcgccaagcgccagcccttgcgcgatgccaataccaatgcgcacgccagtaaagctaccggggccgcgcccgtaagccagagcgttaatatcagtcagggaagttccgctggtggtcaggatatcctgcaccatcggtaagattcgttgagtatgttcacgagggcaaagctcaaaatgagcgttgacagtaccgtcgttccacagggcgacagagcaggcctctgtcgcggtatcgatagccagaattcgcatgggtcttcgtgcttagatcaataaaaaggcgcgcatcataccatactccgtaacaaattacctggaggatggtatcgcaaggaaacgaaccgcacgggcaatgtcacgggtgcgtggcgcgggcggcagactggcgagaaacgtcgcgccgtaaggacgcatcaccagccgattgtcacaaatcaccagcacgccacgatcgtcggcgtcgcgaatcagtcgccctaccccctgtttgagagtaatgacggcatctggtagttgcacttcatcgaacgggtcgccaccgcgcaaacgacaatcttccatgcgcgcttttaacagtggatcatccggcgaggtaaacggcaatttgtcgataattaccaatgacaatgtatcgccacgcacgtccaccccttcccagaaactgctggttgccacaagaagcgcattaccggcgctgacaaattgctgcaacagttgccctttgctggtttccccctgcaacaatacaggaagcgtcatggtagcgcggaactgctcggccagatcgcgcatcatggcgtgcgaggtacaaagcataaaacaacgaccgttgttagcttcgatgatcggtcgcagcattgccgctaactggcgagcagaacctggctggttggtttgcggcagattgcgcagcacacagagtaacgcctggcggctgtaatcaaatgggctgggcaacagcaacgactcggcctgttcgatgccaagccgcgaggtgaaatgatgcagatcgtcgttcaccgacagcgttgctgaggtgaagatccagctaccgggtttttgcgccattaactctttgaatttatccgccacgctgagcggcgtgagagccagagtaaaatggcgcgaagtgcattcgtaccagtagctgtagcccggctgattgatctcttttagccgcttcagccgtgtgcgatacaacgtggcgcgctcaaatgccgcatccagcaaggcggaacgccccagtgacagtttcgccacgtcataacaaagttccagggtgtcatcgagcagtaaaaatgcccgctgaatttgcggattagctaacagctcacgcaggttaccgcgataacctggctcaccgagttgcagacgaaaatcctgcgcactctgggcaagacgatcagcgcacttttgtaactgctgggtgtcttttaattcggtgcggtaggcgatggtgatgtcttttgccaggtcgagcagttgtcgactggagagtgactgaccaaaatactggctggcaatgtccggtagctggtgggcttcgtcgaagatcatgacgtccgcttccgggatcagttcgccaaatccactctctttaaccaccatatccgccagaaagagatgatggtttaccaccaccacatcggcgtccatcgcttttttacgtgctttgaccacaaagcaatctttatacatcgggcagtcgctgccaagacagttgtcgttggtgctggtgaccagcggccacgcctgtgaatcttccgccacgctgacgcaggtgctgatatcaccatcgactgtttgattagaccaggagcgcagcaggatcacatcgcttaagatttgtaccggcagatcgccccccgccagcgcctgctgttcgagacgttcgaggcagaggtagtttgagcgccctttcagcagcgccacgttgcccgtatatttcaatgcctttgagactgttggcaaatcgcggctgtagagctgatcctgcaacgcttttgagccggtcgagataatgactttctttttcgcccgcagcgcaggagccaggtaagcgtaggttttgcccgtaccggttcctgcttccaccaccagcggctggcctttttctatcgcctgggtgacggctaccgccatctgtcgctgtggttctcgcggcttaaagcctggtatcgctttcgccagctgaccgtctggtgcaaaatcgtccgtcacactaccccctgttgatttgaacagggattatgtcaggatgagggcgctttcgccagttgaagtggtgacggcgacctcacattgtggcagtctttgcagcacgaaaatggaagtataatgaggacaaaatgatgactatcgttcgtatcgatgctgaagcccgctggtctgatgtagtaatccacaacaacacgctctactacactggtgtaccggaaaacctcgacgccgatgcctttgagcaaaccgccaacacgctggcacagattgacgccgtgctggaaaaacagggcagcaataaatcgagcattctggatgccaccattttcctggccgataaaaacgacttcgcggcgatgaataaagcgtgggatgcttgggttgtcgcgggtcatgcgccggtgcgctgcacggtacaagcgggtttgatgaacccgaagtataaagttgaaattaagattgtggctgcggtgtaagctttatcgaagcaaaataagtcagacgataatttatcgataatactggtcggttttacataaatcgaccagagaataagatattactgttgatgcttctgctaattcattatttatatttataatttcaattttatctataaaactaactatataaataaacataaacatgccgttgtgttcgccctttgattagcaactctggttttctttcttagctgaacaatctggttatagcgtgcggactgaccgttaaatttctccatcttactggataacacaccatgagctgctacctttaaaacacctgaatgtcaacaggttaactcgtgccatatcgttataatccctttgatattagatgcaaattaaggtcatatatagccttatcgataacatggttaattttaaggataagaatatgcctgctgtaatagataaagccctggatttcattggtgccatggatgtatcagcgccaacaccaagttcgatgaatgaaagcacggcgaagggaatctttaaatatttaaaagaactgggagtacccgcgagtgccgctgatattacggcgcgagctgaccaggaaggctggaaccctgggttcacggaaaaaatggttggatgggcaaaaaaaatggagacaggtgaacgttctgtgattaaaaatcctgaatacttttcaacatatatgcaggaagaactaaaagcactggtctgagttaaatttatatcagcataaatgggtcaggacgcttttaatcacatataaaaagcgtcctttttctcacaatcaaatgatcatcggcttctataacgaaatcgatacggattagtgtgttactcgtcttcatcctcaaaacgcgccacgattcgctcgccggagtggttggcacgcagctcttctgccaccagcgcgattgcctggccgctgctcatcccttgtgccatcagttcctggatccgctcgacagctttttgctgctgttcatgggtgagtgaaggtaaacctgcaaacattgttaactcctgctaaattgttggcgctaattatttcatgctacccggcacatagccagtagagtcaggactgatgaagacgttatctcccgctgtgattactttactctggcgtcaggacgccgctgaattttatttctcccgcttaagccacctgccgtgggcgatgcttttacactccggctatgccgatcatccgtatagccgctttgatattgtggtcgccgagccgatttgcactttaaccactttcggtaaagaaaccgttgttagtgaaagcgaaaaacgcacaacgaccactgatgacccgctacaggtgctccagcaggtgctggatcgcgcagacattcgcccaacgcataacgaagatttgccatttcagggcggcgcactggggttgtttggctacgatctgggccgccgttttgagtcactgccagaaattgcggaacaagatatcgttctgccggatatggcagtgggtatctacgattgggcgctcattgtcgaccaccagcgtcatacagtttctttgctgagtcataatgatgtcaatgcccgtcgggcctggctggaaagccagcaattctcgccgcaggaagatttcacgctcacttccgactggcaatccaatatgacccgcgagcagtacggcgaaaaatttcgccaggtacaggaatatctgcacagcggtgattgctatcaggtgaatctcgcccaacgttttcatgcgacctattctggcgatgaatggcaggcattccttcagcttaatcaggccaaccgcgcgccatttagcgcttttttacgtcttgaacagggtgcaattttaagcctttcgccagagcggtttattctttgtgataatagtgaaatccagacccgcccgattaaaggcacgctaccacgcctgcccgatcctcaggaagatagcaaacaagcagtaaaactggcgaactcagcgaaagatcgtgccgaaaatctgatgattgtcgatttaatgcgtaatgatatcggtcgtgttgccgtagcaggttcggtaaaagtaccagagctgttcgtggtggaacccttccctgccgtgcatcatctggtcagcaccataacggcgcaactaccagaacagttacacgccagcgatctgctgcgcgcagcttttcctggtggctcaataaccggggctccgaaagtacgggctatggaaattatcgacgaactggaaccgcagcgacgcaatgcctggtgcggcagcattggctatttgagcttttgcggcaacatggataccagtattactatccgcacgctgactgccattaacggacaaattttctgctctgcgggcggtggaattgtcgccgatagccaggaagaagcggaatatcaggaaacttttgataaagttaatcgtatcctgaagcaactggagaagtaagacgtggaataccgtagcctgacgcttgatgattttttatcgcgctttcaacttttgcgcccgcaaattaaccgggaaaccctaaatcatcgtcaggctgctgtgttaatccccatcgtccgtcgaccgcaaccggggttgttgctgactcagcgttcgattcatctgcgtaaacacgctggacaagtggcattccctggaggtgcagtcgatgacacggacgcatcagctatcgccgccgcgctgcgcgaagctgaagaagaggtcgctataccgccttccgccgttgaagttatcggcgtgctgccgcccgtcgatagcgtcactggctaccaggtaaccccagtggtcggcattatcccgcccgatctgccgtatcgcgccagtgaagatgaagtctcggcggtgtttgaaatgccgctcgcccaggcattacatctgggtcgttatcaccctttagatatctaccgccgtggtgattcacatcgggtatggctgtcctggtacgaacagtattttgtatggggaatgaccgcaggcataattcgtgagctggcgctgcaaattggtgtgaaaccctgactatacttatctttacatctacaaaacactacttgagacaatcatcgcaatattagttaaatcgcggtttttgattagtttaattcatgtgaatagttaagccagtcgccgcgttccctcttacactatgcgctgttattagttcgttactggaagtccagtcaccttgtcaggagtattatcgtgattagtctattcgacatgtttaaggtggggattggtccctcatcttcccataccgtagggcctatgaaggcaggtaaacagttcgtcgatgatctggtcgaaaaaggcttactggatagcgttactcgcgttgccgtggacgtttatggttcactgtcgctgacgggtaaaggccaccacaccgatatcgccattattatgggtcttgcaggtaacgaacctgccaccgtggatatcgacagtattcccggttttattcgcgacgtagaagagcgcgaacgtctgctgctggcacagggacggcatgaagtggatttcccgcgcgacaacgggatgcgttttcataacggcaacctgccgctgcatgaaaacggtatgcaaatccacgcctataacggcgatgaagtcgtctacagcaaaacttattattccatcggcggcggttttatcgtcgatgaagaacactttggtcaggatgctgccaacgaagtaagcgtgccgtatccgttcaaatctgccaccgaactgctcgcgtactgtaatgaaaccggctattcgctgtctggtctcgctatgcagaacgaactggcgctgcacagcaagaaagagatcgacgagtatttcgcgcatgtctggcaaaccatgcaggcatgtatcgatcgcgggatgaacaccgaaggtgtactgccaggcccgctgcgcgtgccacgtcgtgcgtctgccctgcgccggatgctggtttccagcgataaactgtctaacgatccgatgaatgtcattgactgggtaaacatgtttgcgctggcagttaacgaagaaaacgccgccggtggtcgtgtggtaactgcgccaaccaacggtgcctgcggtatcgttccggcagtgctggcttactatgaccactttattgaatcggtcagcccggacatctatacccgttactttatggcagcgggcgcgattggtgcattgtataaaatgaacgcctctatttccggtgcggaagttggttgccagggcgaagtgggtgttgcctgttcaatggctgctgcgggtcttgcagaactgctgggcggtagcccggaacaggtttgcgtggcggcggaaattggcatggaacacaaccttggtttaacctgcgacccggttgcagggcaggttcaggtgccgtgcattgagcgtaatgccattgcctctgtgaaggcgattaacgccgcgcggatggctctgcgccgcaccagtgcaccgcgcgtctcgctggataaggtcatcgaaacgatgtacgaaaccggtaaggacatgaacgccaaataccgcgaaacctcacgcggtggtctggcaatcaaagtccagtgtgactaatacttcttactcgcccatctgcaacggatgggcgaatttatacccgctttctcgtctgctgtaatattccccactacacttccactgttgcgtcaggcgtttgtcgccatacgcttacagggtggcccgcatgcaaaaagcacaacggatcattaaaacctatcgtcgtaatcgaatgattgtttgtacgatttgcgcactcgttacgctcgcttcgaccctgagcgtgcgatttatttcacagcgtaacttaaatcaacaacgggtagtacaattcgccaatcacgctgtagaggaattagataaagtactgcttcccctacaggcaggtagcgaagtcttgcttccgctgattggtctgccctgctctgtcgcccatttgccattacgtaaacaggcggcaaaactccaaactgtgcgatccattggcctggtgcaagacggcacactttattgctccagcatttttggttatcgcaatgtgcccgtcgtggacattctggctgaacttcctgcaccgcaaccacttttacgcctgacgatcgaccgtgccctgattaaaggcagtccggttttgattcaatggacgcctgcagcgggcagtagcaatgctggggtcatggagatgattaacatcgacttactgacggcaatgctgcttgagccacaactgccgcaaatcagtagcgccagcctgacggtggacaaacggcatttgctctatggtaatgggctggtagattcccttccgcaacctgaagacaatgaaaactatcaggtttcttcgcaacgctttccttttaccattaacgttaatggtccgggggctacggcgctggcatggcactatcttccaacacaattaccgctggcggtgctgctaagtttactggtgggctacatcgcctggctggcgaccgcttaccgaatgagcttttcccgcgaaatcaatctgggcctggcgcaacatgagttcgaattgttctgtcagcctttgcttaatgcgcgcagccagcaatgtattggtgtagagattttgctgcgctggaacaatccgcgtcagggctggatttcaccggatgtgtttattcctatcgcggaagaacatcatttaattgtgccactgacccgctatgtgatggcagaaaccattcgtcagcgccatgttttcccgatgagtagtcagtttcatgttggcattaacgtcgcacccagccattttcgccgtggtgtgctgataaaagatctcaatcagtactggtttagcgctcacccgattcagcaactgatcctcgaaatcaccgaacgcgatgccttactggatgttgattatcggattgcccgcgagctgcatcgtaaaaacgtcaaactggcgattgatgacttcggcaccggcaacagctcgttttcctggcttgaaacattacgtcctgacgtgctgaaaattgataagtcatttaccgcagctataggttctgacgcggttaactcgacggtgaccgatatcatcatcgcgctggggcaaagactgaatattgaactggtggcggagggcgtggaaacgcaagaacaggcgaagtatttgcgccgtcatggcgtgcatattttgcaagggtatttgtacgcacagccgatgccgctacgtgattttcccaaatggctggcgggcagccaaccgccgcccgcccggcataatggacatatcacgcccattatgccgttacgttaacgcttactcatcttcatcgtgcgccggttgctctttaacaatgcgaaccagatcaacacgataatcattggcttcaatgatggtgatatgcagtggccctacatcaatcacatcgcccacacggggaatgtgaccatttgccgagatcacgaggcccgcgaccgtcgcgatatcatcgtcatcggcaaggtgctcaacatcaagcgcctgctgcaaggcatgcaaatctgtaccgccttttaccagccagccgtcaccatcagtaatgatttccggcgtttcgtcagcgtccgggaattcacccgcaatggcttccagcacatccagcggcgtgaccagaccttgtaccacaccaaactcgttggtcacgataacaaagctcccgcgagcacgacgcagcacgcccaacaggttgatcggatcgagggtttccgggacgataatcgccggagacgccgaagcaatcgccgccacatcaacgccctcttccagcgccaccagcagttctttagcacgtacaataccgatgatttcatccagttcaccgcgacataccgggaacagactgtgcggtgaagagagcagttgctcgcggatttcatcgaccccgagattagcgtcaacccagcttatttcaccgcgcggcgtcatgatcccgcgcagagaacgcgacgccagcgtcagtacgccgttaatcatgtaacgttcttcttcggcaaatgcaccttccgggatcggcatcggcatcgggttatcggcatcgtgctgaacattggcctgacgtttcccgcccatcaaacgcaggatggcatcggcagtacgcgctcgcagcggcaaagtcgactggtggcgaataaagttgcgacgcgcaatctggttaaacacttcgatgatgatcgagaagccaatcgcggcatacaggtaacctttcggaatgtggaaaccgaaaccttctgccaccagactcagaccaatcattaacaggaagctcagacagagcaccaccaccgtggggtgctggttaacgaatcgcgtcagcggtttggatgccagcaacataaccgccatcgcaatcactaccgccgccatcatcaccggcagatggttaaccatccctactgcagtaattaccgcatccaacgagaagacggcgtcaaggatgacaatctgtgtgacgaccacccagaaactggcgtagcctttaccgtggccggaatcatgatcgcggttttccagccgttcatgcagttcggttgttgctttgaacagcaagaatatccccccgaacaacataatcaggtcgcgtccggagaaggagaaatccatgacggtaaatagcggtttggtcagcgtgaccatccatgaaatcagcgacagcagccccagacgcataatcagcgccagtgataaccccagcaaacgcgctttatcgcgttgttttggcggcagtttgtcagcaagaatggcgatgaagaccaggttatcgatacccagcacaatttcgagaacaacaagcgtgagtagccccgcccaaattgaggggtccattaagaattccatgacaagctcctgcttaaggaatagctattcgacgccagaaataatgcaggcgtaacgacaaaatgcaaacgaaaggtgcggcatagagtgccagaaaggcaggcgttaaaaggcctgatgctgaaatgacgtcggtgacgatccatactgcgggctactgccctatactccatggttgttaaacgggagttaaacatatcagagacgcctctgatttggcaaagatttaccttcctttgcaaacgaatgtgacaaggatattttacctttcgaaatttctgctaatcgaaagttaaattacggatcttcatcacataaaataattttttcgatatctaaaataaatcgcgaaacgcaggggtttttggttgtagcccttatctgaatcgattcgattgtggacgacgattcaaaaatacatctggcacgttgaggtgttaacgataataaaggaggtagcaagtgaccattgctattgttataggcacacatggttgggctgcagagcagttgcttaaaacggcagaaatgctgttaggcgagcaggaaaacgtcggctggatcgatttcgttccaggtgaaaatgccgaaacgctgattgaaaagtacaacgctcagttggcaaaactcgacaccactaaaggcgtgctgtttctcgttgatacatggggaggcagcccgttcaatgctgccagccgcattgtcgtcgacaaagagcattatgaagtcattgcaggcgttaacattccaatgctcgtggaaacgttaatggcccgtgatgatgacccaagctttgatgaactggtggcactggcagtagaaacaggccgtgaaggcgtgaaagcactgaaagccaaaccggttgaaaaagccgcgccagcacccgctgccgcagcaccaaaagcggctccaactccggcaaaaccaatggggccaaacgactacatggttattggccttgcgcgtatcgacgaccgtctgattcacggtcaggtcgccacccgctggaccaaagaaaccaatgtctcccgtattattgttgttagtgatgaagtggctgcggataccgttcgtaagacactgctcacccaggttgcacctccgggcgtaacagcacacgtagttgatgttgccaaaatgattcgcgtctacaacaacccgaaatatgctggcgaacgcgtaatgctgttatttaccaacccaacagatgtagagcgtctcgttgaaggcggcgtgaaaatcacctctgttaacgtcggtggtatggcattccgtcagggtaaaacccaggtgaataacgcggtttcggttgatgaaaaagatatcgaggcgttcaagaaactgaatgcgcgcggtattgagctggaagtccgtaaggtttccaccgatccgaaactgaaaatgatggatctgatcagcaaaatcgataagtaacgtattgtgttgattatcactcagttttcacacttaagtcttacgtaaacaggagaagtacaatggagattaccactcttcaaattgtgctggtatttatcgtagcctgtatcgcaggtatgggatcaatcctcgatgaatttcagtttcaccgtccgctaatcgcgtgtaccctggtgggtatcgttcttggggatatgaaaaccggtattattatcggtggtacgctggaaatgatcgcgctgggctggatgaacatcggtgctgcagttgcgcctgacgccgctctggcttctatcatttctaccattctggttatcgcaggtcatcagagcattggtgcaggtatcgcactggcaatccctctggccgctgcgggccaggtactgaccatcatcgttcgtactattaccgttgctttccagcacgctgcggataaggctgctgataacggcaacctgacagcgatttcctggatccacgtttcttctctgttcctgcaagcaatgcgtgtggctattccggccgtcatcgttgcgctgtctgttggtaccagcgaagtacagaacatgctgaatgcgattccggaagtggtgaccaatggtctgaatatcgccggtggcatgatcgtggtggttggttatgcgatggttatcaacatgatgcgtgctggctacctgatgccgttcttctacctcggcttcgtaaccgcagcattcaccaactttaacctggttgctctgggtgtgattggtactgttatggcagtgctctacatccaacttagcccgaaatacaaccgcgtagccggtgcgcctgctcaggcagctggtaacaacgatctcgataacgaactggactaacaggtgagcgaaatggttgatacaactcaaactaccaccgagaaaaaactcactcaaagtgatattcgtggcgtcttcctgcgttctaacctcttccagggttcatggaacttcgaacgtatgcaggcactgggtttctgcttctctatggtaccggcaattcgtcgcctctaccctgagaacaacgaagctcgtaaacaagctattcgccgtcacctggagttctttaacacccagccgttcgtggctgcgccgattctcggcgtaaccctggcgctggaagaacagcgtgctaatggcgcagagatcgacgacggtgctatcaacggtatcaaagtcggtttgatggggccactggctggtgtaggcgacccgatcttctggggaaccgtacgtccggtatttgcagcactgggtgccggtatcgcgatgagcggcagcctgttaggtccgctgctgttcttcatcctgtttaacctggtgcgtctggcaacccgttactacggcgtagcgtatggttactccaaaggtatcgatatcgttaaagatatgggtggtggcttcctgcaaaaactgacggaaggggcgtctatcctcggcctgtttgtcatgggggcattggttaacaagtggacacatgtcaacatcccgctggttgtctctcgcattactgaccagacgggcaaagaacacgttactactgtccagactattctggaccagttaatgccaggcctggtaccactgctgctgacctttgcttgtatgtggctactgcgcaaaaaagttaacccgctgtggatcatcgttggcttcttcgtcatcggtatcgctggttacgcttgcggcctgctgggactgtaagactgttgtacactaccggggccttttggccccgtttttttatctggaggattaatgacaatcacggacctggtactgattcttttcatcgccgcactcctggccttcgcgatctacgatcagttcatcatgccccgccgtaacggccccaccctgctggcaattcctttgctccggcgtggtcgcatcgatagcgttatcttcgtcggattgattgtcattcttatctataacaacgtcacgaatcatggtgcgttaataacgacatggttattaagcgcactggctctgatgggtttttatatattctggatccgcgttccgaagatcatctttaaacaaaaaggttttttcttcgccaatgtctggattgaatatagccgaatcaaagcgatgaacttgtcggaagatggcgtgttggtgatgcaattagaacagcgtcggctgttaatccgcgttcgaaatatcgacgatctggaaaaaatttataagcttctcgtttcaactcaataagttatgaatttagccaaagctatgtttagtgtatttttaataatcagacatagcttaggctatattacctcttcccttatttgttatttattttaacgtttcattgatatataaatccaaatgaaaatcgttatcaataaagcaatgaaataatatattccaacagttgttttatattctcaaaatatgttaaggttgcgccctcatttggggagtagccgatttccagattccggaaatgtacgtgtcaacatactcgttgcaaaacgtggcacgtacggactgaatactttcagtcaggcgagaccatatgcacatcaatcgctatgcctgcatgaacgcgaaaaccatcacggcttgttgttcatgtatgcatgtttgctgggggcgatgatgtgttttatggataccccggtcaggacattgtcatgaatatcactgctactgttcttcttgcgtttggtatgtcgatggatgcatttgctgcatcaatcggtaaaggtgccaccctccataaaccgaaattttctgaagcattgcgaaccggccttatttttggtgccgtcgaaaccctgacgccgctgatcggctggggaatgggcatgttagccagccggtttgtccttgaatggaaccactggattgcgtttgtgctgctgatattcctcggcgggcgaatgattattgagggttttcgtggcgcagatgatgaagatgaagagccgcgccgtcgacacggtttctggctactggtaaccaccgcgattgccaccagcctggatgccatggctgtgggtgttggtcttgctttcctgcaggtcaacattatcgcgaccgcattggccattggttgtgcaaccttgattatgtcaacattagggatgatggttggtcgctttatcggctcaattattgggaaaaaagcggaaattctcggcgggctggtgctgatcggcatcggcgtccagatcctctggacgcacttccacggttaataagaacgctgccagaggtgaatattaaagtccgtctggcagtcgaacacttcttttgctgccagtgtttgccagacttctggcttcgcacgccaggcaaacggcgtcatctgcaataatgcgacggcttcatcaccgcgaagacgcatcggataacacaactccgcactctgctgtaatgtaaaaccttccagttgttctgcatgaggtgcatgaagatgtacttcattgtaaatcagccccttcagctccatcaaatgtcgcggtcccggcgtggcagtaatgacccagccgccgggcttcactactcgtgctaattcttctgctttacacggcgcgtaaatacgtattatggcgtccatactggtatcggaaaacggcaaacggtggctggaagcgacacaaaaagtgacctgcggatagcgtttcgccgccgcttttatcgctaccttcgaaacatccagaccaaacgtggtgatttcgggcaacgcatcggcaaatgcgtgtgtgtaatacccttcaccacagccaatatccagcaccgccgtggccttatcatcaagccgttccctcagttgggcgacaattgcatcacgcagcggctgataatgtccggcatctaagaatgcgcggcgtgcttgcatcatttccgcgctgtcgcccggatcacgagaccgtttatgctgaacgggcagcagattgacatacccttctttcgccatatcaaactgatgtcgctggggacagatatagctgtttttttcacgcgaaagaggctgatggcaaagtggacaggaaaaagacatgacaactccggcaggatactaaaggccgcaagtgtaacgcgaatcacgcggcgggcaaatatccgaacgccaggagcgaagataaagcatagtaaaaagcctcgcattcgacgaggctttatagcgagattgaagcgtattcacacttcagatcagtggattcgatcagatagctgttacgttaacagctgccggacctttctggccgtcctgaatttcgaactcaacgttctgaccttcagccagagttttgaagccattaccctggatagcggagaagtgtacgaacacatctttgctgccatcagccggagtaatgaagccaaaacctttagactcgttgaaccacttaacctgacctttaatctttgccatttgaaaaattccttagattgttttcttcgcccgcaggcataacatagataaaactgacacattactgcatgaggcaccaatataaggctcggcagagaagcggtattcaacgtcaacgtgtttactcaggacttctttactgaaaatgccacacataaacagaactgtacctcgtttaacccgaaatctgttatcacatacaacgttaattatggcaagccatttttaaacatgtctcgatcagacgcacaaatctcgatacgtcttccactttttttgcacacttatgcaacggaatacgcgccgatatatcattgtgcttaaccttgccagttcaggcagatacttaaactggcgtattttctaacatagttcaataagttcagttgttccaggccagtgggagaagttattacatagtgcgtgcaatatcacattttttgctatgcaatgaataaaaagttatatcactttttctcataaaacagtcagttaacggctattaattaccctaaagagaagtcaatccccaaagggattgtaaatttaaaataagaaaaattgatgaatgagcaaaaaaatcaagagagaaacgtttcgctaataaataataccacgcttaatcacaaatccgatgtaaacatcctaataaattaatggggtaaatatctttttctgatatcccgttacgcaaataaataatatgataattatttgaagtcagaccagagttttaatttgaagcagttgcaccatgacagtgcgtataatcaggatgaattgagtaacccttcaacgacggggttactcaagattgaggaaggattatcgttcggcgaccagacgaataatatcttcgtcttcaaccgatttttgactctcaacggtctttttatctgctttctctggttcgtttgcttcgcacaaacgacgtaacagtgcattttgacgtttttgctgatccagcaacgcctcaagcagttcaatctgttcgttagtccgtgaactggcacgattgataaaaaaccacaagatgagcccgataagaagaaccaccaccgatacaaccaaagacgcaatgttcatcacgcctgaatttacaacttcgttcatttcaccacctctgagtagaggcgctattctaccactgctggagaggaagaaaatctagtgctgaaaaaatgatatcaccacgggataaactggttaatggcacaaattccgctgaaaaattgtacatcctgatcgcacatcatgttgaatacctgcgcccaaagcagcaagcaagccaacaccacgacaaccagaacgacccatcgaaactttttcactccaatctccgtttcacctaccttatgtcattaaactagcatgcgttagttaaacagcgcctaactatgtcgatattcgtgctttttcggaatgagtcgcttgcttcagcgcatattgccgctacgattaagcgaacataaaaagagaagaggttgtaatgcgattcatcattcgcacagttatgctgatagcactggtatggataggattattactcagcggatatggcgttttgattggaagcaaagagaatgccgcaggattaggtttgcaatgtacctatctgactgccagaggcaccagcacggtacaatacttgcacactaaaagtggttttttggggataacagattgcccgctgttacgcaaaagcaatatcgtggtcgataatggttaagggcaataaataaccagattctcactcctgagtaaaatactcttatagcaagcgcgtttaatataacgccaccttcaactttatttttctcatgctaaataaagaacctgtctgtttgatattccgacaggttcttactctcatcagaacggatagtcgtgataacccatttgggcagaaattttgcgcgctgcggtatgcaacattgcgacatattcctgtaaacgctcttcagagaaacgcaacgtcgggaaggagatgctcaaaccggcaatgaccacgccaaagcgatcaaataccggtaccgcaatgcatcgcagcccttcttcctgctcttcattatcttcgccatacccctgctcgcgcacctggtccagaacgggtaataacgcttctgtactggtgatggtccgctcggtactgcgtttatactccacgccctcaagaatttgcttcacttcatcgcgatcgcgccatgccagcagtaccttaccaatcgcggtgctgtacagcggattacgacgcccaatccgtgaatacatgcgcaaattgtacatagagtcaattttgtgaatgtaaacaatactgtcttcgtccagtgcgccgaggtggatagtttctttggtcaggcgggagagctcacgcatctggatatctgcgctacgaattaaatcgacgttttgtaacgcgcgagcgcccagttcaaacaatttcagggtcagggaatatttctccgactccccttcctgcgccacataacctaaggttttcatggtctgtaaaaagcgataaacggtgctttttgacatcatgacgcgctgcgacagctcggttatccctatttcgcgctcttcacccagcgcctgcaaaatgccaaaaacttttagcacggaagatacagaatcaggctgtttatccagatctgcgttagccatttatcacctcattgcgagtgttttataaaaatcagaactgttttttattataatttcgcaccagggtggtcgcaatccatcttttgccggttagttacaattctgcgacatccaccgtgaatatcagtgctagaatcatacccctgttgattattcaccaaagatataaaattcctatgccaaaagttcaggccgacggcctgccattgccccagcgatacggtgcgatattaaccattgtgattggtatttcgatggccgtccttgacggcgcaatcgccaacgtcgccctgccaacaatcgccacggaccttcatgccacgccagccagttccatctgggtagtgaacgcctatcaaatcgccattgtcatctccctgctctcgttttcgtttctgggcgatatgtttggctatcgacgtatttataaatgcggtctggtcgtttttctgttgtcttcactgttctgcgccctttctgattcgctgcaaatgctcacccttgcgcgtgtcatacaaggtttcggcggtgcagcgttgatgagcgttaataccgcacttatccgcctgatctatccacaacgttttctgggtagagggatgggcataaactcgtttattgttgccgtctcttctgctgccgggccgacaattgctgcagcaatcctctccatcgcatcctggaaatggttatttttaatcaacgtaccgttaggtattatcgccctgcttctggcgatgcgttttctgccacccaatggttctcgcgccagtaaaccccgtttcgacctgcccagcgccgtgatgaacgcgttaaccttcggcctgcttatcactgcgttgagtggtttcgctcaggggcaatcgctgacgttaattgctgcggaactggtggtaatggttgttgttggtattttctttattcgccgccagctttctcttcccgtaccgctgctaccggtggatttactgcgtatcccgctgttttcactttctatttgcacatctgtttgctctttctgcgcacaaatgctggcaatggtttccctgcccttttacctgcaaaccgtgctcgggcgtagtgaagtcgaaacaggtttacttctgacaccgtggccgttagcaacgatggtgatggctccgctggcaggctatttgattgaacgcgtacatgcaggattgctgggggctttagggttgttcatcatggctgcggggcttttttccctggttctgctgcccgcgtcacctgcggatatcaatattatctggccgatgatcttatgtggtgctggatttggcttattccagtcacccaataaccacaccattattacctccgcgcctcgcgaacgtagcggtggagccagtggcatgttaggaacggctcgtctactgggtcagagtagcggcgcggcgctggtggcgctgatgctaaatcagtttggagataatggtacacacgtctcgctgatggctgcggctattctggcagtgattgctgcctgtgtcagtggtttacgtatcactcagccacgatccagggcataaaaaaagcgcgtcgatcaggacgcgctttttagtatttacttcatattacttcaggtattcacccgtacgcagagcttcaattcgtttatccagcggcgggtgggtcatgaacaactcactgagcgatttcgacttaccgttaatgcagagagccatcatgctggttgcttcttgcggttcatagctggttttcaggcgctgcagcgcggcaatcattttctcgcgaccaaccagttttgccgaaccggcatcagcatggaattcacgatgacgcgagaaccacatggtgataatgctcgccagaataccaaacaccagttccagaaccgttgcaaccgcaaagtagatcagcgggttgccgttgctctcttcaccttcatcacgatttccgcccataaaacccgcggcaagctgcgccagaatacgggaaataaagataacgaaggtgttcaccacgccctgaatcagcgtcatggtgaccatatcaccattggcgatgtggctgatttcgtgagcaattaccgcctcggcttcatccgggctcatgttctgcagcaaaccggtgctgacagcaaccagagaggcatcacggcgcgcaccggttgcaaaagcgttgatgtccggcgcatggtagatagccacttgcggcatagcgatccccgcctgacgagcctgggttgctacagtattgaccagccaacgttccctttcgttacgcggttgctcgatcacttccccgccaacagatcgtaatgccatccatttggacatcagaagcgaaacgaaggaaccaccaaaaccgaacagcaaggccatgatcatcagcccctgaacgctgctcgactgtatccctgtcaggctcagtaccagcccgaaaacgaccattacggccaggttcgttagcaggaagagcgcgattcgcatcataattttctttttacctcagtttaacaaaacgcaatatgcgatacccacatcgtatgggttacgcgactattttcaagtctggatagtgcgtaagtcaccagaaagacacaactttacattttgtagcatctgatttacggcatcttgtcgctgttaaaaaatcaggcacaatttcttgtgcctgattgatattacttgacgggagcgggttgttccgcgggtctggctttttcaagcttcgccagatcgagtgcgatattcaccgtctcatccagataaggatccggctcctggtaatctttcggtagatcatccagtttcttcaactccggtttaccttcgcgtttaaagcgttcgttcaaacgcgccagacgcgtcgcatcatcttcattattctctttctcacgcacagcgtaattcagagaaacgatattgcgcttgtccttcatagcgttgaagcgcgcgatatccttcatgatgttctggaactcaggatctttcgcgatacgcgcattatgttccttcagcagctccggttcaaaggccgttaaatctcctgatttcacataagtcgcggcatcaatgctatcccacggcagcgcgttatcttcgaatttctcacccgtttccgtttcttcattacccgtcggcatgatgatgtctggcgttacgcctttacgttgcgtactgccgccgttaacgcgatagaatttctggatcgtgtactgcacagaacccagcgctggccattcaggacgtaacatctgatcgtaaatacggttcaatgaacggtattgctgaacggtgcctttaccaaacgtcggttcacccacaaccagcgcacgaccgtaatcctgcattgccgcggcaaagatttctgaagccgaagcactgaagcggtcaaccagcaccaccagcgggcctttatagaaaacctgtccgtcggtatcgctatcttcacgaaccttgccgttgttatcgcggacctgaacaatgggacccgcaggaataaacagaccggagagcgatacggcttcagttaacgccccaccgccattgctacgcaggtcgatgatgacgctgctgacattctgtttttccagtttctgcagttgcactttgacatcgtctgtcaaacccacatagaagcccggaatatccagcacgccgactttctctttaccgacggtcttcaccgacattttaaccgcgcggtcttcgagacgaatacgttcacgggtcaacgttacagtacgggtcttggtccctttaccagcaggtaaaatttccagacgaactttactgcccttcggccctttaattaaggcaaccacatcatcaagacgccagccaatcacgtcaaccatcggcttgcctgtttgaccaacaccgacaattttgtcaccaacgctgatagctttactcttcgctgccggaccacctgccaccatcgaattgataacggtgtagtcatcatccatttgcagcactgcgccaataccttccagcgacaaactcatttcagtgttgaactgttcggtattacgcggggaaagatagttggtatgcgggtcgatttcacgcgcaaacgccgtcattgccagcgagaaaacatcttcgctgttggtttgcgccagacgacgaatggcaaatttgtagcggcgagtcagggtttcacgaatttctttatccgtttttcctgtcagcttcaggcttaactcgtcgaatttgactttactgtcccacagcgcgttcaactcagcctcgtttttcggccagggcgctttgctgcggtcaaggttataagtgtcgttgccggtgaaatccatcggcttttccagtaccgacaaagcgtactggtaacgctcaaaacggcgcttttgcgccagattgtagagatcgtagaaaacgtcgagtttgcctgaacgcagttcatcgcctaactcggttttctttttcgcgaactgttcaacatcgcttgccagcagcacgttgtggctgtaatcgagcagattcaggtagcggtcaaagattttggccgaaaatgcctgatcgaggtcgaactggcgataatgagaacgggtgaagcgcgacgttacgcgctcacttaccgtcgcatgctgcgtctcttcctttaataccggaatttgatcagcacgcgtgatatcttctacagcgaaggtctggcctgctattgcaagcaggccagctaacgcggtaagcctaaaaaacatgttcatgcctggcccggcctccgtttcagaacaccaggtgttctgcgcgcacaatcaaagacatacccgaattcagctggacgcggacgccgtctttggtgatttctaatacggtggcatccatcgcgttttgacccgctttcaccttcagggcttgtccgacagtcagagctgaaatgtcagaaaccggggtgtgctgttcttcgcgaggtgcttttactgtttttggcgctttctctaccggcttttgcgcacgaggtttacgttcagcgccttctttgcggcgtggcgtagtcggacgtggcttgcgttcgcggcgcggtgcgtcttctttctcaccagcagttgcggcagcttcgcgttttttcgcttgctgttcagcacgctgtgcctgaacacgcgctttcgcttcttcaagctgcttgcgagcatgctctacatgttgctcgtccagctcaccgcatgggttgccgtcaagatcgacacgcgttgcgccgggtttaacaccgtaaagataacgccagctcgaagtgtagagacgtaaagcggatcgcaattgcgttttgctcaggttcatttccccagcaacacgatcgaccaaatcctgaaaaataccgattttcagcggacgcgcttcaccttccgcactgaaacagtggggaaaacgttcggccagaaacgcgattacttctttactgctattcaacttaggttgattttccatgaaatttcctgattacaacggacgtagccaacaagcgcaggcatgaacaggcgtcattataatgacgctatcagtaaatgctacgttatccgttgattatcctgcgacgctcgcaaagaattttttgtaatccgtcgttgcaagcactttttcaagctgtgccacaagctgacgtaagccttgctcgtcctcgtctgtaaagcgaccgaagacggtactatcgatgtcgagaacaccaataatctgatttttcaccaccagcggcagaacaatttcagaattactcgccgcatcacaggcaatatgcccgtcaaacacatgaacatcctcgatacgctgcacttgattgcgggcaaccgcagtgccgcacacgccgcgcccgacgggtatccggacacaggcaattttgccctgaaatggtccgagtaccagtgtatcgtcctcaagcaaataaaaacctgcccagtttatgtcagtgagacgctcatataacaacgcactggtgttcgcaagcgttgccagaaaactggtttctcccgccatcagcgcgttaaagtcgcgatttaaatccgcgtaaaattctgttttgttcattatataatcacttggttgtcttacctggatctgccagcctattaaaataagcattaaatgcgttaatgctcaagatcattcccatcatgggttaagattaatgttaattcttattacatttggcacgtcatggctcttaacacaccacaaattacgccgacaaaaaagataacagtgagggcaatcggcgaggaactgccgcgtggtgattaccaacgttgcccgcaatgtgacatgctgtttagcctgcccgagataaattctcatcaaagtgcctattgtccgcgctgtcaggcaaaaattcgtgacgggcgcgactggtcgctaacgcgcctggcggcaatggccttcaccatgctgttgcttatgccgtttgcctggggcgaaccgctgttgcatatctggctgttaggcattcgtattgacgccaacgttatgcaaggcatctggcaaatgaccaaacagggcgatgcgataacggggtcgatggtctttttctgcgttattggtgccccgctcattctggtgacctccatagcttatttatggtttggtaaccgactgggaatgaatttacgtccggtactgctgatgcttgagcgacttaaagagtgggtaatgctcgatatctacctggtcggcattggcgttgcttctataaaggtacaggattatgcccatatccaggctggtgtcggcttgttctcttttgtggcgttggtgattttaacgacggtgacgttgtcacatcttaatgtcgaagaactgtgggagcgattttatccgcagcgccccgctacgcgtagggacgagaaacttcgtgtctgtcttgggtgccattttaccggctatccagatcagcgtggtcgctgcccgcgttgccatatcccgctacgcctgcgtcgccgtcatagtctgcaaaaatgctgggcggcgctgttagcgtcaatcgttttattgttacctgccaacctgttgcctatttctatcatttatctgaacggaggacggcaggaagatacaattctttccggaattatgtcgctggcaagtagcaacattgcggttgcaggaatcgtgtttatcgccagtattctggtaccgtttactaaagtgatcgtcatgttcactttactgttgagcattcattttaaatgccagcaaggtttacgcacacgcattctgttactgcggatggtgacctggattggtcgctggtcgatgctcgacctgtttgtcatatctttaaccatgtcgctgattaatcgcgatcagatcctcgcttttactatgggaccggctgcgttttatttcggcgcagcggtaattttgactattcttgctgtggaatggctggacagccgcttactttgggatgcacatgagtcaggaaacgcccgcttcgacgactgaagcgcagattaaaaataaacgccgtatctcacctttctggctgctgccgttcatcgcgctaatgattgccagttggctgatttgggacagttatcaggaccggggtaataccgtcaccatcgactttatgtcggcggatggtattgttccaggccgtacgcctgttcgttatcagggcgttgaagtcggaacagtgcaggatatcagcctcagcgacgatcttcgtaagattgaagtcaaggtcagcatcaagtccgatatgaaagatgcgctgcgcgaagagactcagttctggctggtgacgccaaaagcatcgttggcaggtgtctccgggctggacgccctcgtcggtgggaactatatcggcatgatgccgggtaaaggtaaagagcaggatcactttgtcgcactcgatacccaaccgaaatatcggctggacaatggcgatctgatgatccacctgcaagcccccgatctcggttcgctgaacagcggttcattggtctatttccgcaagatcccggtgggaaaagtctacgactatgccatcaatcccaacaagcaaggcgtggtgattgatgtcctgatcgagcggcgttttaccgatctggtgaaaaaaggtagccgtttctggaacgtttccggcgttgatgccaacgtcagtatcagtggcgcgaaggtgaaactggaaagcctggcggcactggttaacggtgcgattgccttcgattcaccagaagagtcgaaacctgccgaggcggaagatacctttggtctgtatgaagatctggcccacagccagcgtggcgtaataataaaactggaactgccgagtggggccggattaaccgccgactcgacgccgttaatgtatcaggggctggaagtcggacagctgactaaactggatttaaatcctggtggtaaagtcacaggggaaatgaccgttgatcccagcgtcgttaccctgcttcgtgaaaatacccgcatcgaattacgcaacccgaaattatcccttagcgatgctaatctcagcgccctgctgaccggcaaaaccttcgagctggtgcccggcgatggcgagccacgcaaagagttcgttgttgtgccaggcgaaaaagcactgctgcatgaacctgatgttctgacgctgaccctgaccgcgccggaaagttacggtattgatgcgggtcagccgctcattcttcacggcgtgcaggtaggccaggttatcgatcgtaaactcaccagcaaaggcgtcacctttaccgtcgccatcgagcctcagcatcgcgaactggtaaaaggcgatagcaaatttgtcgtcaacagccgtgtcgatgtgaaggtggggctggatggcgttgagtttctcggtgccagcgcctcagaatggatcaatggcgggatacgtattctgccgggcgataaaggtgagatgaaagccagctatccactgtatgccaatttggaaaaagcgctggagaacagccttagcgatttacccaccacaaccgtgagtttgagtgcagagacgctgccggatgtgcaggcaggatcggtagtgctgtaccgtaaatttgaagttggtgaagtgattaccgtgcgtccgcgagctaacgcgtttgatatcgatctgcatattaagccggagtatcgcaaccttctgaccagcaatagcgtgttctgggcagaaggcggggcgaaagttcagctgaatggtagtggtctgaccgtacaggcatccccgctctccagagcattaaagggagccattagcttcgacaacctcagcggtgccagcgccagtcagcgtaaaggcgataagcgtattctgtatgcttccgaaacagcggcccgtgcggttggcgggcagattacgcttcacgctttcgatgccggaaaactggcggtcgggatgccaattcgctatctcggtattgatatcgggcaaatccagacgctggatctgattaccgcacgcaatgaagtacaggcaaaggcggtactttacccggaatatgtccagacctttgctcgcggtggtacgcgcttctcagtggtcacaccgcaaatttcggcagctggcgttgagcatcttgatactatcctccagccgtatatcaacgtcgaaccaggccggggcaatcctcgccgcgactttgaattacaagaggccaccattactgattcgcgttacctggatggcttaagcattattgttgaagcgccggaagccggttcgttaggcatcggtacgcctgtgctgttccgtggtctggaagtcggtacggttacaggaatgacgctggggacattgtcagatcgcgtgatgattgcgatgcgcatcagtaaacgctatcaacacctggtgcgtaacaattccgtcttctggttggcatcgggttacagtctggactttggtctgacgggcggcgtagtgaaaaccggcacctttaaccagtttatccgtggcggcatcgccttcgccacgcctccgggtacgccactggcaccgaaagcccaggaaggcaaacacttcctgttgcaggaaagtgaaccgaaagagtggcgtgaatggggaactgcgcttcccaaataatgcccactgctccggcgtgcctgcgccggagcgtttatgctaaactgcgcgcctgtttttttgccagtggtacatgctcgtggcccaacacaccgtttatttcccggacgcctttctgacacaaatgcgcgaagcgatgccttcgacgctctcatttgatgattttcttgccgcctgtcagcgcccgttgcgccgcagcattcgcgttaatacgctgaaaatctccgttgctgatttcctgcaattaaccgctccttatggctggacgcttacgccaattccgtggtgtgaagaaggtttctggattgaacgcgacaatgaagatgcattgccattgggtagtaccgccgagcatttaagtggcctgttttatattcaggaagccagttcaatgttgcctgttgccgccttgtttgctgacggtaatgcaccacagcgggtgatggatgtcgctgccgcgcctggctccaaaacgacgcaaatttccgcgcggatgaataacgaaggggcaatccttgccaatgagttttccgccagtcgggtaaaagtgttacatgccaatatcagccgctgtggtatcagtaatgttgcgctcacacattttgatggccgcgtgtttggtgcggcagtgccagaaatgttcgatgccattttgctggacgctccctgctctggcgaaggcgtggtgcgtaaagatcccgatgcgctaaaaaactggtcaccagaaagcaatcaggaaatcgcagctacacaacgggagcttatcgacagcgcctttcatgcattacgtcctggtggtacgctggtttactcgacctgtaccttaaaccaggaagaaaacgaagccgtttgcctgtggctgaaagagacttaccccgacgcagtagagtttttaccacttggcgatctcttccctggtgcaaacaaagcgctgaccgaagaaggctttttgcatgttttcccacaaatttacgactgcgaaggcttcttcgttgctcgtctgcgtaaaactcaggcgattcccgccttacccgcccccaaatacaaagtcggtaattttccgttcagcccggtgaaagatcgcgaagctggacaaattcgtcaggcggctacaggtgttggcttaaactgggatgaaaacctgcgcctctggcagcgtgacaaagaactgtggttgttcccggtgggcattgaagccctgatcggtaaagtccgattttctcggttggggattaaacttgccgagacgcacaacaaaggttatcgctggcagcatgaagcggttattgctcttgcctcacccgataatatgaatgcattcgagctgacaccgcaggaagcggaggagtggtatcgcgggcgcgatgtttacccgcaagccgcgccagtggcggatgatgtattggttactttccagcatcaaccgattggtttagccaaacggattggttcgcgattgaaaaacagctatccgcgtgaactggtgcgcgatgggaaactttttaccggtaacgcctgacagcgcacaaaaaaagcgcactttttgactggcacattcggctgcctcaactaggctgaaaaatggtgcgatcggactggtcgtaccacaatcggcagctaaatggagagcacgaagatgaaaaccagtgtgcgcataggcgcttttgaaatcgacgacggcgaattacacggtgaatcgccaggtgatcgaacgttaaccattccttgtaaatctgaccccgatttatgtatgcaactggatgcctgggatgctgaaaccagtatccctgccctgctaaatggcgaacactctgtcctttaccgtacccgttacgatcaacaatctgatgcctggattatgcgtcttgcctgatccaaaaagaacccgtcggcatggcgggttatttgtcctggttattcccccgttgtaaaatctctcctaaacttaacggtacggcaccacacttcggggatgaaatgttcgcgctggtactttttgtttgctacctggatggcggttgtgaagatattgttgtggatgtctacaacacggaacagcagtgtctttattctatgagcgatcaacggatccgccagggcggttgttttccgattgaggattttatagatggtttctggcgacctgcacaggagtacggtgatttttaattattgcaattgcacaagagtcagttcgcccccaaagacagcaccggtatcaatataatgcaggttgccaatatccacgcgatgtcgcaacggtgtatgaccaaaccagaaatgatcagcacctgtaattccctgccctttttggcgttcacctaatcgcgagcggctccacaagacctgatgcaaatcaacgtccttttgccattcataaacatcatctggataatcggcatgagcaataacatgcttgccggtgcgactgtgtacttcaagaataaagggcaaatgctgacatttttccagcgccgttttcgcttgtttctgttgattatctgccagcgcaataaaccagtcgccgccattcatcaaccacaaagacatctgctgggatgccagcgcatccatcgccatctgttcatgattgcctcttaccgcacaaacccaatgttgttccagtaactgcagacaacgtaaactttgcggcccacgatcgataacgtctcccactgagataagtaaatctcgccacggatcaaaacgacaatgccataatttgcggcgcaactgctcaagacaaccgtgtatatcgccagaaagccagatatgtcgccattgatgacccgcaattctctgataaacgggcgcaggctgtttcatcaatattttcctcccgcgctaaagatcacataatcttaacaagaatgttaaaaaacgctggactcagacagtagagtgtgtgttatggttgactataaagtcagcgaaggaaatgcttctggcttttaacagataaaaagagaccgaacacgattcctgtattcggtccagggaaatggctcttgggagagagccgtgcgctaaaagttggcattaatgcaggcttagttgccttgccctttaagaatagatgacgacgccaggttttccagtttgcgtgcaaaatggtcaataaaaagcgtggtggtcatcagctgaaatgttaaaaaccgcccgttctggtgaaagaactgaggcggtttttttattggaaatcaaaaggctattttaggtaattaacagagtttttcagctcgttctataaacggtgccagactcattttttcgccgggattgttaggatcatcaatctgaatcaccgaaatgggttgggcattggtcttcccactggcaacttccttttgtgcgatatcgtttaaaggatactgcacgagggtactcggattaataacatacaaagcattacccggtcggcaagtcagcatcacctcttcgcgattaaacgcccatttgtctttacccacttcaaaacgactgacggtaatcacctgcggtgcagccagcgccgctgcagaactggtgagtaacagaaacgccagaatactttttttcatcattttcgtaatccatcaaaaaggttcgagagtcgcaagcaggctgatgatcaccagcactaccgcacctatcgcccattcgagtttagtcatccacacaaaccagggtgccgcacgatcttcatcctgcctcatgcgcggtacaagaacataacgattagccagcgcaatgaccaccataatcatcaccaggatggctttgagcaataagagttggccccagtaagtcgtaagcgtggggggaaatccggtaatcaacaatgcattaagcacgccgcttgccagtacgccgatcaccgcaaaatgcccgcaccaggaaaaacgcatcagcgcctgaatagcctggtgtcgccaacggcctttgatgagttgcatacaccagagcaccggcagtaatcccccaaaccacgccgccgcacaaatcaggtgaatcgcgtgattagtctgatggattttcgctgttaccccttcattcagcgtcgcatgccccactcccgccagcagaataaattgcgcggtagtgagcataaacagcaaacgtggcatattccgcggttgcataagggcgacgatcaacgttacgagggcgagaacaatttgccataaccagatgccaccaaactgcgtttgcaaaacagcctgccaaatgtttggcgaaaatacatctgtccatcccgttcccatcaacccgccctgaacggcgagcattgcagtggcactgatcaaactccagacggcagcgtgctgttgtaaacgcagaaaacgcttcgccagcaagcgacgaatcgtcaagggggccagccaggcaccgtacattgcgaagccaaaaaccagcatcagcgaggtgaaatggataaatcgcagcgcgatccaggtaaacgccagcatgatttatttcacgctaaaggtgtagtgtcctttcgttttatgcccgtccaccgaaacaacatgccagtcaacggtgtaggttccgggtttcagcgaatcggccagtggaacaatcagttgcttttggtcctgctcatttcgcttcgccggtaatgttttaatattttcgttttttggccccgtgatttttgcaccactgaatcctgtttcaacaccttccgagaagtttaaagtgattgcctgcggtgcagctgtcacttgcgcgtttgccgcaggatactgatgcgttaaatgcgcatgtgcccagacggaaggtgtcaccaacgaagtggtcaggattgccagcgcgtagcgaagggagcgtgcagttgaagccatattatctattcctttttgtaataacttttttacagagcataaccttgtctaatgtctgagtcgaggatcatcaattccggcttgccatcctggctcactcttagtaacttttgcccgcgaatgatgaggagattaagaatgctgaagaatctggctaaactggatcaaacagaaatggataaagtgaatgtcgatttggcggcggccggggtggcatttaaagaacgctacaatatgccggtgatcgctgaagcggttgaacgtgaacagcctgaacatttgcgcagctggtttcgcgagcggcttattgcccaccgtttggcttcggtcaatctgtcacgtttaccttacgagcccaaacttaaataaaacttatacagagttacactttcttacataacgcctgctaaattatgagtattttctaaaccgcactcataatttgcagtcattttgaaaaggaagtcattatgtcgttctggaaagttgcagcagcgcaatatgagcctcgtaaaacctcactcaccgaacaggtagctcatcatctggagtttgtgagggccgccgccaggcaacaatgtcagctgttagtttttccatcgctttctttactggggtgtgattattcgcgacgtgcccttcctgccccacccgatctctcactgttagacccgctttgttatgccgcaacgacctggcgaatgaccatcattgccggccttcccgttgaatataacgatcgctttattcgtggaattgcggtgttcgcaccgtggcgaaaaacgcctgggatctaccatcagagtcatggtgcatgtctgggccgtcgttccagaaccatcacggtggtcgatgaacaaccgcaaggtatggatatggacccgacctgttcactgtttactacagggcaatgtctgggagaacccgacctgctggcgtcggcccgtcgcttacaatttttttcacatcagtactcgattgccgtgctgatggcaaatgcccgtggtaacagtgcactatgggatgaatatggtcgtctcatcgttcgcgccgatcgtggttcattattgttagtcggtcagcgttcatcacagggttggcaaggcgatatcattccattacgctaggctttttcggcctggagcatgccatgttgcgcattatcgatacagaaacctgcggtttgcagggagggatcgttgagattgcctctgttgatgtcattgacggaaaaatcgtcaaccccatgagccacctggtgcgccccgatcgtcctattagtccacaagcgatggcgattcatcgcatcaccgaagccatggtcgccgataaaccgtggattgaagatgtgatcccacactattacggtagtgaatggtatgtcgcgcataacgccagctttgaccgccgcgtactgcctgagatgcccggtgagtggatttgcactatgaaactggcccgtcgtttgtggcctgggatcaagtacagcaatatggcgttatataaaacacgcaagctcaatgtacagacgccgccgggcctgcatcatcaccgcgcgttgtatgactgttatatcaccgccgcgttgcttatcgatattatgaacacctccggctggacggcagaacagatggccgatatcaccggacgtccgtcgttgatgacgaccttcacctttggcaaataccgtggcaaagcggtttccgacgttgccgaacgcgatccgggctatctgcgctggttatttaataacctggacagcatgagcccggagctgcgtttaacactgaaacattatctggaaaatacttagtccgcaggcgtagcgggtaatgttccctgcgccagcgcgaccagaaaagcatattccatcgctacgccttcgtacgatttaaagcgaccagatttaccgccatggcctgagtccatgtcggtacagagcaataaaagatggtcatcggttttcagctcgcgcaatttagcgacccattttgccggttcccaatattgcacctgagaatcgtgcaaaccggtcgttaccagtaaatgcggataagcctgtgcggtgacgttgtcatacgggctgtagcttttcatgtactcgtaatattgcggatcctgcgggttaccccactcttcaaactcaccagtggtaagaggaattgattcatcaagcatcgttgttacaacatcaacaaacggtacctgggcgataacgccgtggaataattccgggcgttgattaattgcaacgcccatcaacatgccccccgcactcccgcccatcgcataacaaagcgaaggagagccatagcccagttttaacaatgcatcgcaggcatcaagataatcattaaacgtatttttcttcttcagaaattttccgtcttcgtaccattgttgccccagctcaccaccgccgcgaacatggacaatggcgtagacaaagccacgatctaacaaactcaagcggctaaaactgaaatcggcatcaatacttgcgccgtaagaaccatagccatacaccagcaacgggttgtgtcctttgcgaaaatgtttgcgatggtagaccaacgaaaccggaacttcgacgccatcacgggcgactatccacaggtgttcactgcggtaattcgccgcataaaaaccaggaacttccgtttgttttaatacacgacgctcaccggtatccatatccagttcaaacaaagtgtctggtgtagtcatggaagaataaccataacgcaatcgcgcggtttcaggttctggattgtaggcaatccaggtcacataggccggatcatcaaaggcaataccaatgacttcccgggtcttgcggttaatttggcgcaaactggttaacccgcgctgacgctcttcaaccaccagccagtcggtaaacagcgtaaacccttccagcatgatgttttcgcgtggcggaattaactcttcccactgttgctcatcacgcatacgggtacggtataagccaaagtttttgccgtggcggttggaacgcagataaaaacgatgctggtagtgatcaaggctgtattcgtgatctttgcggcgcggcagaaaaacaaacggctcggcatcggccatttccgcgtccagcaggcgaacttcactggtggtggcgctggccaaatgaatgactacatagtgcttcgaggtcgttttatgcaggctgacgtaataggtatcgtctttttcttcgtagatcagtttatcttgcgatgctggcgtaccgatggcgtgacgccagacctgataaggcagcagcgtcaccggatgcttgcgaacatagtagaaaatccaggagtcatttgcccagacaaagctgggttcaacgttatccagcagttccgggtaccagttaccagtttccagattacgaaaacgaatgccgtactggcgtcgggaaagaaaatcttctgccagcgccataatggtgttatcgggcgtaatcgccattccgcccatcgaataaaactcactatgagctgcgcgcttattggcatcgagcaatgtttcccactcatcccactcttcactgaatgccgattgacgctggtagatagcatattcacagcctggttcataaatatgccgatagcggtagccatttttgatgtagggcgcagaaacttctcgttgcggaatgcggtcgatgatttcctttaagatgcgatcctgcaaggcttgttgtgaggccatcacccgatgaccgtaactattttcttgttgcaggtagtccaggacttctggctgagaacgcgtatcgtcccgcagccagtagtaattatcgatgcgcgtatcgccatgaagcgtcatggcgtggggaatgcgggcggcttttggtagcatgttattgttctttctggttgaaacatcttataagggtggcaaaactcaccggggatgcaagcgaaacaggggagtcattgcttagatgatgacaggtaatggcgcggatatcgaatgttatgcagacagagaaaatcagcctgttcaaatggctgtgcgattctggatagcccgaaatagtcaacttcaggctatccagagagcggaattattccgccaaagtgcgtttttgctgttcgagatcgcgttcaatgccgtcacgaacatcctgggggattttcagcgcgtcacccagtgcattcaggtaactgcgttccataaaatggtcaatatcaatagccgcgcaactcaggaaatagatttccagcgcctcttcttcattgcggaccccggtagccaggcgttgtggatccagcggttgttcgattgcctgctcaatgagtacacgcccctgctcttccacgccggctccacgcaattgctggtcgattgccgcacgttctttggcatcaatatgaccatcacttttagcggcaaagaccagcgcaaggatcaaacgtgctgtacgctcatccagcggcgtactttgcgcgccaaactgcggttcgtcctgatgcgccgcgcgaattttatctttgtatttattccacagcaccgtacccgctaccgctccgccgccaaccagtaacgcgttggtgccatatttcgtaagaagtttacgtgctgatttatttgcgaccagcagcccagccagtccgcctaatgcgcctggcactaacagtttgaccaatccctgatccgcagacgaggaggtagaagaactgctttgcccaagcagggattgcagttgatttaaccagttagccatatttgctcctcaataaccatttttagtgcctgtagcatagcggatgaggatgtcagaaaatgtatatcgagacaaaagatgcgcaaataagcggggcggtaggccgttattcaaagaaattcgcgccaggtaaggtatttactgtatatcaggtgataagggtattttaggtgaaagtagtttgtcgttttgagtggcattgtttgatgctgattgcccgatgcgacgctgttgcgtcttctcaggcctacgattgtggtgcgttctggggcggacaaggcactcgcgccgcatccgccaacagtcaatcgaattatcagaagccattaacgccgctgatattccgccattcccgctttgcagtccacgctgacctggtaatgaatatcggcacttttaccacgcacggttagcggtactgaccatttatcatctttaccctgaatgtcctgcaaactgacccaagccacgggatcggcctgaccgacaattttttgatcatctgcccaacgcgccacgcgattttgttgataatcacgttttacgctcgcggcaattccggcagcatccagatcttcacactttgggaaagtgaccgacttgctggtttcattattggcagcgaaaactgatgcgcaggcagaaaccaacaacagccctaaaaacgcccctctttttttcatgtttttctccatagcacaatgattcaggagaaagcatggtacaaattgtcaggagcgcaagttgcttcaggccgcgtgtgaggcatcttcctcttcggattcagcaccgacgacctgtggggacggtaatttgccggttttcagaatggtgctcagcacatctttttgttctgccagccatagcgaaagggcttcacgttgctcgtcttccatttgcactggagaatttgtcagccaggtgtcaagcagatccgccgtatcaagcattttgtcataagcatcggcttcctttttgctggtaaacgacattttctcttcgccctcacgaatgactacgtatttaacttcaaccgccatttgcagcctctcataataactgtgattttatacagtatatttcttttcggttgagaaatcaacatcagcaataaagacacacgcaaacgttttcgtttatactgcgcgcggaattaatcaggggatattcgttatgacgttattaggcactgcgctgcgtccggcagcaactcgcgtgatgttattaggctccggtgaactgggtaaagaagtggcaatcgagtgtcagcgtctcggcgtagaggtgattgccgtcgatcgctatgccgacgcaccagccatgcatgtcgcgcatcgctcccatgtcattaatatgcttgatggtgatgcattacgccgtgtggttgaactggaaaaaccacattatatcgtgccggagatcgaagctattgccaccgatatgctgatccaacttgaagaggaaggactgaatgttgtcccctgcgctcgcgcaacgaaattaacgatgaatcgcgagggtatccgtcgcctggcggcagaagagctgcagctgcccacttccacttatcgttttgccgatagcgaaagccttttccgcgaggcggttgctgacattggctatccctgcattgtaaaaccggtgatgagctcttccggcaaggggcagacgtttattcgttctgcagagcaacttgctcaggcatggaagtacgctcagcaaggcggtcgcgccggagcgggccgcgtaattgttgaaggcgtcgttaagtttgacttcgaaattaccctgctaaccgtcagcgcggtggatggcgtccatttctgtgcaccagtaggtcatcgccaggaagatggcgactaccgtgaatcctggcaaccacagcaaatgagcccgcttgcccttgaacgtgcgcaggagattgcccgtaaagtggtgctggcactgggcggttatgggttgtttggtgtcgagctatttgtctgtggtgatgaggtgattttcagtgaggtctcccctcgtccacatgataccgggatggtgacgttaatttctcaagatctctcagagtttgccctgcatgtacgtgccttcctcggacttccggttggcgggatccgtcagtatggtcctgcagcttctgccgttattctgccacaactgaccagtcagaatgtcacgtttgataatgtgcagaatgccgtaggcgcagatttgcagattcgtttatttggtaagccggaaattgatggcagccgtcgtctgggggtggcactggctactgcagagagtgttgttgacgccattgaacgcgcgaagcacgccgccggacaggtaaaagtacagggttaaacccggcaaaaaaacgctacaaaaatgcccgatcctcgatcgggcattttgacttttacagcttagcgccttctacagcttcacgcgccagcttagtaatgcggtcgtaatcgcccgcttccagcgcatctgccggaaccagccaggaaccaccgatgcacagcacgcttttcagcgccaggtagtcacggtagttagccggagaaataccacccgtcgggcagaaacggacctgggagaacggacccgcgatcgcctgcagggctttcacgccgccgttagcttcagccgggaagaatttgaactctttcaaaccgtagtccatacccagcatcagttcggaaacagtgctgatccccggaatcagaggaatagtcccttcggtagcagctttcagcagcggctcggtcagacccgggctaattgcgaactgtgcacccgcttcagtgacttctgccagctgctgtggattcagcaccgtaccggcacccacaatcgcttcaggcacttctttggcgatagcacggatagcgtcaactgcacactcggtacgcagagtcacttccagaacgcgcaccccaccagcaaccaacgcttttgccatcggcaccgcgtgttccagtttttttaccacgataaccggtacaaccgggccggtggtcaggattgattctgcacttgttttccagtttttcatcagagttttctctcgcctgattacaaatttgtcgtcttaaaaagtgatacaggttgcgccctgttcggcaccggacagtttttcacgcaaggcgctgaataattcacgtcctgttcccacgcgtgacgcgctcaggtcaggaatgtgcggttcgcgagcagccagttccgcttcgtctaccagcagcgtcagttcgcctgtctgtccattcacacgaatgatgtccccgtcgcgcacttttgccagcagcccgccatcgtaggcttctggtgttacgtggatagctgacggcactttacctgaagcgccggagagtcgtccatcggtaactaacgcaattttgaaacaccggtccaataatacaccaagtggcggcatgagtttatgtaattctggcattccgttcgcttttggcccctgatgacggacaacaacgacacaatcgcggtccagcaaacccgcttcaaaggccggcataacgtcatgctggctttcaaaaacaaccgctggcgcttcaatcacctggttctcaaccggcacggcagaggttttcataaccgcacggcccaggttaccgcttaacacttttgtcccaccatgatgagagaaaggttgttcgaaggaagcgatcacattgctgtcgagtgatttttccgccccttcccgccagtccagttcaccattattcagccatggttcaagggtataacgagacagaccaaaacctgccaccgtattgacatcttcatgcagcaggcctgctttgagcagttcacgcaccagaaccggtacgccacctgccgcctggaagtggttaatatcggccggaccgttcgggtagagacgtgccatcagcggtacaacatcagaaaggtcagagaagtcatcccagttaatctgaataccggccgcgcgcgccatcgccaccaggtgcatggtgtggttagtggaaccaccggtcgccagcagtgcaacgataccgttcaccaccactttctcatcgatcatcttaccgatcggcatccattcattaccattaccggtcatgcgtgtaacctgacgcgcagctgcggcggtcaaagcatcgcgcagcggagaatccggatgaacaaaagaagagcctggcaactgcatccccataaactccaccaccatctggttggtgttggcagtaccgtagaaagtacatgttcccggcgcatggtaagacgcggcttctgactccagtaaggccatgcggtccactttaccttcggcataaagctggcgaatacgcactttttctttatttggcaaaccgcttgccatcggtccagacggcacaaacaccgcaggcaaatgaccaaacgacagggctgccatcgtcagacccgggacaatcttgtcgcacacaccgaggaacagagcaccatcaaacatgttatgggacagccccaccgccgcagacatcgctatcacttcgcggcttagcagcgacaattccattccatcctgcccctgggtgacaccatcacacatcgccggaacaccgcccgcaacctgaccaaccgcattcgcttcatgcagggctttacgaatgatttctggatagtgttcataaggctggtgcgcggagagcatgtcgttataggaggtgatgatggcgatattgttacgcaacatgcttttcaaagaggctttgtcttctggctggcaggcagcgaaaccgtgtgccaggttaccgcatgccaactgcgaacgatgaacggtcgaagttttcgcttgttctatccgggcgagataagcagagcgagtctcgcgcgaacgttcaatgattcgatttgttacgcgtaacaattgtggattcataaaggctcctgaaattgagttgtcagagcaggatgattcacaacgcgtttcattcagaggatttatgactgaaacgcctgtaaccggagctcatagggcaaaaacgtttcagtcagtgtaataaaaaaagcctcgtgggtgaatccgcacgaggcctgaaagtgtaaaaattgttctacaatctgcgcaagatcatgttaccggtaaaataaccataaaggataagcgcagatattactcaaactcattccaggaacgaccatcacgggtaatcatcgccaccgaggcaacgggtccccaggttccggcctgatacggtttcggcgcatcattgtccatcgcccacgcctcagtaatggagtctacccatttccaggcttcttccacttcgtcgcgacgtacaaacagtgcctgaataccacgcatggtttccagcagcaaacgttcataggcatccgccagatgcgtctgattaaaggtttctgaatagctcagatccagcttggtgatttgcaggttatgtttgtggtcaaggccaggaactttattcagtacctggatatccacgccttcatcaggttgcagacggatagtcagtttattctgcggcagatcctgccacgattctttaaacagattcagttcaggtgttttgaaatagaccacgacttcagaacatttggtcggcagacgtttaccagtacgcaggtagaatggcacaccggcccagcgccagttatcaatgtcgacgcggatcgccacgaaagtttctgtattgctgctcttgttcgcgccctcttcttccagatatcccggcacttttttgccctgggcgaagcccgcagtatattgcccgcgtacggttttttcgcgtacgttggagcggtcgatgcggcgcagagacttcagtactttcactttttcatcgcggatgctgtctgcgctcaggtcagacggcggagacatcgcaatcatgcaaagaatttgcagcaggtggttctggatcatgtcgcgcatctgaccggctttatcaaaatagccccagcgcccttcgatccccacttcttctgccacggtaatctcaacatgatcaatggtgcgattgtcccagttattcacaaacagggagttagcaaaacgcagcgccaacaggttcagcaccgtttctttaccaagatagtggtcgatacggtaaacctggcactcctcgaagtattcgccaacctgatcattgatttcctgcgaggtcgccagcgacgtccccagcggtttctccatgactacgcgtgccggtttagcattcagttttgcctcgccaagccctttgcaaattgcgccaaaagtgctgggcggcatggcaaagtagttaatggtgatacgatttttttgatccagcatcgcgccgagacggctgaatgcagcagtgtcattgacatcgagattacaaaaatccagacgtgcactcagggtgtcccataaaccttcatcaatggtttctttcatgaaagtttcgagcgcctcgcggacaactttggtatatgccgctttatcccagtcagcacgccctacgccgataatccgggtgtccgggttgagctgaccggctttttccagttgatacagggaaggcagcaatttacgacgcgcaaggtcgcctttcgcgccgaaaatgaccaggtcacaggcctgggctgtttgcgttaccgccatgtcattctccttaagttaactaacccggtacttaagccagggtatacttgtaattttcttacggtgcactgtactgcttttacgagcttgcgaaaactgtaaacgcttatccacccgtgcgattacgggaaaagcgcgcaaagtgcggcaaaactgataaaaaaatcatcgttttccattgggtaaaaatctgacactgatcatgttatgaaaaaaaataacaacttttttatctgcttttgtcattaacacggcacacaggcgtaatatctgacaaaactgcatttcgatttctttcagtgcggaaatcgtcattacccgtgagtctctttacatcatgaatatgctggaaaaaatccagtctcagctggaacatttgagcaaatcagagcgcaaagttgccgaggtcattctggcttcgcccgataacgcgatccattcgagtattgctgctatggcactggaagccaatgttagcgaaccgacggtgaatcgtttctgtcgcagcatggacacgcgcggttttcctgattttaaacttcatctggcacagagtctggcgaatggcactccctatgttaatcgcaatgtcaatgaagatgacagcgttgaatcatacacagggaaaatatttgagtccgcaatggcaacgcttgatcatgtccgtcattcactggataaatctgccatcaaccgcgccgtcgacttgctcactcaggcaaaaaaaatcgcctttttcggattaggctcttcagccgccgttgcccacgatgcgatgaataagttctttcgttttaatgttccggtggtgtactccgatgatatcgtgctgcaacgcatgagttgtatgaattgtagcgacggagacgtggtggtgctgatttctcacactggaagaacaaaaaatctggtcgagctggcgcagctggcacgcgaaaacgacgccatggtgattgccctcacctctgcgggtaccccgctcgcccgggaagcaacgctggcaattaccctcgacgtaccggaagatactgacatttatatgcccatggtttctcgacttgcacagctgaccgtgatagatgtgctggcgacaggatttactttgcgacgcggtgcaaaattcagagataacttgaagcgggtcaaagaagcgctgaaggaatcgcgttttgataagcagttacttaatttaagtgacgatcgctaaaaacgactgtcactgtcctaatcttatacgacatccgaatgagattaatttatcgccatcgcggcgttatttcattcggatttcatgttcaagcaacacctggttgtttcagtcaacggagtattacatgtccagaaggcttcgcagaacaaaaatcgttaccacgttaggcccagcaacagatcgcgataataatcttgaaaaagttatcgcggcgggtgccaacgttgtacgtatgaacttttctcacggctcgcctgaagatcacaaaatgcgcgcggataaagttcgtgagattgccgcaaaactggggcgtcatgtggctattctgggtgacctccaggggcccaaaatccgtgtatccacctttaaagaaggcaaagttttcctcaatattggggataaattcctgctcgacgccaacctgggtaaaggtgaaggcgacaaagaaaaagtcggtatcgactacaaaggcctgcctgctgacgtcgtgcctggtgacatcctgctgctggacgatggtcgcgtccagttaaaagtactggaagttcagggcatgaaagtgttcaccgaagtcaccgtcggtggtcccctctccaacaataaaggtatcaacaaacttggcggcggtttgtcggctgaagcgctgaccgaaaaagacaaagcagacattaagactgcggcgttgattggcgtagattacctggctgtctccttcccacgctgtggcgaagatctgaactatgcccgtcgcctggcacgcgatgcaggatgtgatgcgaaaattgttgccaaggttgaacgtgcggaagccgtttgcagccaggatgcaatggatgacatcatcctcgcctctgacgtggtaatggttgcacgtggcgacctcggtgtggaaattggcgacccggaactggtcggcattcagaaagcgttgatccgtcgtgcgcgtcagctaaaccgagcggtaatcacggcgacccagatgatggagtcaatgattactaacccgatgccgacgcgtgcagaagtcatggacgtagcaaacgccgttctggatggtactgacgctgtgatgctgtctgcagaaactgccgctgggcagtatccgtcagaaaccgttgcagccatggcgcgcgtttgcctgggtgcggaaaaaatcccgagcatcaacgtttctaaacaccgtctggacgttcagttcgacaatgtggaagaagctattgccatgtcagcaatgtacgcagctaaccacctgaaaggcgttacggcgatcatcaccatgaccgaatcgggtcgtaccgcgctgatgacctcccgtatcagctctggtctgccaattttcgccatgtcgcgccatgaacgtacgctgaacctgactgctctctatcgtggcgttacgccggtgcactttgatagcgctaatgacggcgtagcagctgccagcgaagcggttaatctgctgcgcgataaaggttacttgatgtctggtgacctggtgattgtcacccagggcgacgtgatgagtaccgtgggttctactaataccacgcgtattttaacggtagagtaagtacgttgccggatgcggcgaaaacgccacatccggcctacagttcaatgatagttcaacagatttcgaatattctgaagcaaacttgaacttatcatcaggcgaaggcctctcctcgcgagaggcttttttatttgatgggataaagatctttgcgcttatacggctggatttcgcccggtttgcgagttttcagcaattttagtatccaggtgtattgttctggtcgcggaccaacaaaaatctcgacttcttcattcatccgccgcgcaatcgtatgatcatccgcctctaacagatcatccatcggtgggcgcacctgaatcgtcagacgatgcgtcttgccatcataaatcggaaacagcggtacaacgcgcgcacggcacactttcatcaaacgaccaatcgcgggcaacgtcgctttataggtggcaaagaaatccacaaattcgctgtgctctgggccatgatcctgatcgggtaaataatatccccagtacccctgacgtaccgactggatgaatggtttaataccgtcatttctcgcatgcagacgaccgccaaagcgacgacgcaccgtgttccagacataatcaaaaaccgggttgccctgattatggaacatcgctgccattttctgcccttgcgaggccatcagcatggcaggaatatcgacggcccaaccgtgcggcaccagaaagataactttctcgttattacgccgcatctcttcgatgatctccagcccttgccagtcaacgcgcggctgaattttctccggcccgcgtattgccaactcagccatcattgccatcgcttgcggcgcggtggcaaacatctcatcaacaatcgcttcgcgttcagcttcactacgttctggaaagcagagcgacagattgattaacgcacgacggcgtgagctttttcccagtcgtccggcaaaacgtcccagccgtgccagaatgggatcacggaactttggcggcgttaaagcgatacccgccatcgctgctacgcccagccatgctccccagtagcgcgggtggcgaaaggatttatcaaactcaggaatgtattcgctattattttttttcgtttccatgcttttccagtttcggataaggcaaaaatcaatctggtgatagtgtagcggcgcaacttgccccgcaccaaataaaaaaagccggtactgactgcgtaccggctgcgaatggatgttaattaatcaaaccgtagctgcggcacaatctctttggcctgcgccaggaattcgcgacgatcggagccggtcagcccttcggtacgcggcagttttgccgtcagcgggtttacggcctgctggtttatccatacttcatagtgcagatgcggcccggttgaacgtccggtattaccggaaagcgcgatacggtcgccacgtttcaccttctgtcccggtttcaccagaatcttgcgcaagtgcatataacgcgtggtgtagctgcgaccatgacgaatagccacataataacctgctgcgccactgcgtttggcaaccaccacttcaccgtcacccactgaaagcactggcgtaccctgcggcatggcgaaatcaacacctctgtgtggtgcaacgcgaccggtcaccggattagtacgacgcgggttaaaattagacgagatacggaactgtttcgccgtcgggaatcgcaagaatcctttcgccagaccagtaccgttacgatcgtagaatttgccatcttcagcgcggatagcgtaataatctttaccttctgaacgcaaacgtacgcccagcagctggctttgctcacgtttaccatcaagcatttctcgagacattaacaccgcaaattcatcgccttttttcagtttgcggaaatccatttgccactgcatggctttaatcactgcgctcacttcggcgctggttaaaccggcgtttctggcgctggcaacaaagcttcccccgacggtacctttcagcagattgttaacccactctccttgctgcatttcgctggtcattttaaaaccgttagcggcagtacggtcataggttcgggtttcacgacgagacacttcccaggtgaggcgctgcagttcgccgtccgcggttaatgtccaggagagttgttgaccgattttcaggttacgcaattctttgtcggccgcagccagttgggtgatatcacccatatcaataccatactgattgagaatgctgcttagcgtatcgccagtggaaacaacatattcatgcacgcccgcttcaccggcgattttgtcatccagttcgtcctggggaatggcttcatcttcttgtgcagcttgatcaatcggctcactggcttcaggtaagagcgaacgaatttcgttctgttccagctcaatggttttgacaattggcgtggcatcacggtgataaacataaggccgccagacagcgacggccagagtaagaacggtgagcgaccccaacataacgcggtgtggtcgcggtaaattattaaacgccagggcgacagagcgggctatctgttgcacgtaatcacttcctcattaatctcctttcaggcagctcgcatactggttggctaattgactcaggaattctgaatagcttgttttacccagtttgatattcgtccccaggggatccaacgttcccatacgaacggatgtccctcgtgcgacgctctcaacgaccgctggcctgaactgtggctcagcaaaaacgcaggttgctttttgctcaaccaactgtgttcttatttcatgtaaacgctgcgcgccaggttgaatctcagggttaacggtaaaatgaccaagcggtgtcagtccaaactgtttttcgaaatagccgtaagcatcgtgaaaaacgaaataacctttccccttgagcggcgcgagctcgttaccaacctgcgtttcggttgaggctaattgtgcctcaaaatccttcaggttggcgtcaagtttggctcgactttgcggcataagttccactaattttccatggattgcaaccgctgtagcccgcgctatctctggggaaagccaaagatgcatgttgaaatcgccgtgatggtgatcttcgtcacttttttccgcgtggtcgtgatcatcatcatcgccgtgaatacttttcatcagtagcggtttcacatcttcaagctgcgcaatcgttacctgcttcgctcctggtaatttgcttaccggtttttgcataaacgcttccatctccgggccaacccaaacgactaagtccgcgttctgtaagcgttttacatccgatgggcgcagtgaataatcatgttctgaagcgccgtcaggaagtaaaacctctgtttctgttaccccatcagcaatggcagaagcgatgaacccaacgggtttaagcgaagcgacaacggcggcatctgcggcctgtgttgcacctccccagagagcggcggataatgctgcgaaaagaagcgtttttttatgtaacataatgcgaccaataatcgtaatgaatatgagaagtgtgatattataacatttcatgactactgcaagactaaaattaacatgacaagtctggtttccctggaaaatgtctcggtttcttttggccaacgccgcgtcctctctgatgtgtcgctggaacttaaacctggaaaaattttgactttacttgggccaaatggcgcaggtaagtcgacactggtacgggtagtgctcgggctggtaacacccgatgaaggggttatcaagcgcaacggaaaactgcgcatcggctatgtaccgcagaagctgtatctcgacaccacgttgccactgaccgtaaaccgttttttacgcttacgccctggtacacataaagaagatattttgcctgcactgaaacgtgtccaggccgggcacctgattaacgcaccgatgcaaaagctctctggtggcgaaacgcagcgtgtactattagcgcgagcattgttaaatcgcccgcaattattagtgctggatgaacccactcaaggcgtggatgtaaatggccaggtggcgttatatgaccttattgaccaactgcgtcgtgaactggattgtggcgttttaatggtttctcacgatctgcatctggtgatggcaaaaaccgatgaagtgctgtgcctgaatcaccacatttgttgttccggcacaccggaagttgtttccctgcatccggagtttatttcaatgtttggtcctcgtggtgctgaacaactgggtatctatcgccatcatcataaccatcgtcacgatttacagggacgaattgttttgcgtcggggaaatgatcgctcatgattgaattattatttcccggttggttagccgggatcatgctcgcctgtgccgcgggtccgctgggttcgtttgtagtctggcgtcgtatgtcttatttcggtgatacgctggctcatgcctcattacttggcgtcgcgtttggtttgttgctggacgtgaatccattctatgcggtgattgccgttacgctgctgctggcgggcggtctggtatggctggagaagcgtccacagctggcgatcgacacgttattagggattatggcgcacagtgccctgtcgctgggcctggtggtcgtgagtctgatgtctaatattcgtgttgatttgatggcttacctgttcggtgatttgctggcagtgacgccagaagatctcatctctattgcgattggcgtggtcatcgtggtggctattttgttctggcaatggcgcaatttgctgtcaatgacgataagcccggatctggcgtttgttgatggtgtgaaattacagcgagtgaaattgttgttgatgctggtgacggcattgacgattggtgtagcgatgaaatttgtcggtgcgttgattattacttcgttgctgattattcctgctgctactgcgcgtcgctttgcccgcacgccggaacagatggctggtgtcgctgttttggtggggatggtggcagtgactggcggtttaaccttttccgcggtttacgatacgccggcgggtccgtcggtggtgctatgtgcggcactgttatttattctcagtatgatgaaaaagcaggccagctaatctatcgctgaacacatttgtcggatgcggcgcgagcgccttatccgacctacggttcggtatctctggtagtcctggtaagacgcgaacagcgtcgcatcaggcatattgccagtgccggatgcggcgcgagcgaccaatccgacttacggcatttctggcggcgttatgccaaagtgattccacgcccgcgtcgtcgccatacgcccacgcggtgtacgctgcaaaaagccttgctgaatcaaataaggttccagcacatcctcaatggtttcacgttcttcgccaatggctgccgccaggttatccagacctacaggtccaccaaagaacttatcgattaccgccagcaacaatttgcggtccatataatcgaaaccttcagcatcgacattcaacatatccagcgcctgagcagcgatatctgccgagatggtgccatcgtgcttcacttcggcgaaatcacgcactcgacgcagcagacggttggcaatgcgcggcgtaccgcgagcgcgacgagcaacttccagcgcgccgtcatcactcatctcaagccccataaagcgtgcgctgcgactgacgatatattgcagatccggcacctgataaaactccagacgttgcacaataccaaaacggtcgcgcaacggtgatgtcagcgaacctgcgcgcgtggttgcaccaatcagggtaaacggcggcaaatcaattttaatggagcgtgccgccggaccttcaccaatcatgatatccagttggtagtcttccattgccgggtacagcacttcttcaacaactggcgatagacggtggatctcatcaataaacagcacgtcatgcggttcaaggttagtgagcatcgcagccaaatcgcccgccttttccagcaccggaccagaagtcgtgcgtaaattaacgcccatttcattggcgacaatgttggcaagcgtagttttacccaaccccggaggaccaaaaatcaacaaatgatcgagggcatcgccgcgcagtttcgctgctttgatgaaaatctccatctgtgaacgaacctgcggctgaccaacatactcttccagtaatttggggcgaatggcgcgatctgctacatcttccggcaaagtggtaccggcagaaatcagacggtctgcttcaatcatcctttacctcataacgcggcgcgtagggcttcgcgaattaaagtttcactgctggcgtcagggcgagcgattttgctcaccatgcggcttgcttcttgtggtttatagcccagcgccaccagcgcggcaaccgcttcttgttcagcatcgtcggtcgccgggctggcaggagacgtgagtaccaggtcggcggctggcgtaaagagatcgccatgcaaacctttaaatcggtctttcatttcaacaatcaagcgttcggcggtttttttgccaatacccggcagtttcaccagtgcccccacttcttcacgctcaacggcattaacgaactgctgcgctgacattccggagaggatcgccagcgccaacttcgggccgacgccgttggttttgatcaactctttgaacaatgtgcgctcttgtttattgttaaaaccgtacagcagttgcgcgtcttcacgcaccacaaagtgggtgaaaacgatcgcttcctgacccgcttcagggagttcataaaaacaggtcatcggcatatgcacttcatagcctacgccgcccacttcaattaacaccagcgggggttgtttttcaatgatgatgcctctgagtctgcctatcacatgacgctcctgcgtaatgaatcaaagataatgctgtatgataaaaaaatgctggatagatatccagcgaaggatgaagaaaacttgcgaggtgtctcgatgaactgaaaaatggcacagtataatttattctacaggttatattggaagcaaatattttaatattacatattcagtgaagaaatgcgtaataaaaatatacattgcgcctcctgaaaaaataaattttttatgctattacgtatatttgtatctatttcaatggaatgacaacgtgaatattaattaccctgctgaatatgaaattggagatatcgtctttacatgtataggtgctgccttatttggtcaaatatcagctgcatcaaattgctggagtaatcacgtcgggatcattatcggtcataacggtgaagacttcctggttgcagaaagccgggttcccctttcaaccatcaccacgctatctcgttttattaaacgttcgtctaatcaacgctatgctataaagcgattagacgctgggctgacagaacgacaaaaacaacgaattgttgaacaggttccctcccggctacgcaaactttaccacaccggttttaaatacgaatcttcgcgccagttctgttcaaaatttgtttttgatatttataaagaagcgctatgtattccggtgggtgaaatagagacgtttggagaattgttaaatagcaatccgaatgcaaaactcactttctggaaattctggttcctgggttctattccgtgggagcgtaaaaccgtcacgccagccagtttgtggcatcatccgggtttggtgttgattcatgcggagggagtggaaacgcctcagccggaactgaccgaggcggtataacttaacgcagtcgccctctcgccaggttcagccgcgattcgctcatctgcatcgcattctgactaacgtggcagtgggtgatagcaatcgccagcgcatcggcggcatccgcctgtggattagcgggcagtttcagcaaggtgcggaccatatgctgcacctggcttttttcggcactgccaatacctaccaccgtttgctttacctgacgtgccgcgtattcaaatactggcaactcctgattcaccgccgccacaatcgccacgccgcgcgcctggcccagtttcagggctgagtcagcgttctttgccataaagacttgttcaatggcgaaataatcaggctggaactgggtgatgatttccgtcacgcccgcatagatgagtttcagacgagacggtaaatcatccactttggtgcggatgcatccgctacccaggtaggacagttgcctacctacctggcggatgacgccgtagccggtcacgcgcgaacccggatcaatgccgagaataatagccatcacgcgtctccgttttgctgtttagcaggcctcatcagagagtcgctgcgacctcatcagagatttcaccgttatggtaaacttcctgcacgtcgtcgcaatcttccagcatatcgatcagacgcatcagtttcggtgcggtttctgcatccatatcagctttggtagacgggatcatggaaacttccgcgctgtctgctttcagacctgccgcttccagagcgtcgcgcactttacccatttcttcccatgcagtgtagacatcaatcgcgccgtcatcataggtcacaacgtcttcagcacctgcttccagtgctgcttccatgatggtgtcttcatcgcctttctcgaaggagatcacgccttttttgctgaacagataggcaacggaaccatcagtaccgaggttaccgccacatttgctaaatgcatgacgcacttcagcaacggtacggttgcggttgtcagacagacattcaatcatgattgccgtgccgccaggaccgtaaccttcgtagatgatggtttccatgtttgcatcatcatcaccgcccacaccacgtgcaattgcgcggttcagtgtgtcacgggtcatgttgttagacagtgctttatccaccgccgcacgcagacgcgggttagcgtccggatcgccaccgcccagcttagccgcggttaccagctcacgaatgattttagtgaagattttaccgcgcttagcatcctgcgcagctttacgatgtctggtgttggcccatttactatgacctgccataaaaatatctccagatagccctgcctgttcaggcagcgttaattacaaactgttcaatcgcctgccggttgctccaggacttagtgagcgccgccgcagcaggcgcatcaagccacttgtaagccagatgttcagtgaaaacgatctgccgctcgtgcggaagcgcaagacagaaccatgattccgtattacgcgtcacgcccggcgcatagcgatgacgtaaatgtgaaaaaatttcaaactctaccgtgcgctgacagtcaattaaggtcagttgttcagcgacaacatcaatggtgacctcttcctttacttcgcgcatggcagcttgcggcgcggtttcaccctcttccacgctgccggttaccgactgccagaaatcgggatcgtcacgccgctgcaacatcagcacccgtttcgtatcttgtgcgtagatgaccactaagatcgaaacgggacgcttatacactttatccttcacgctgcctcttcgttgactgccttcgctcatcccattcacatagttatctatgctcatgggagttcactcagttgccgcctcgatgcaacgcgaatgatttcgtgtatttgagtcatatcagttattctcagccttcttcacaacctgaatgctcagctcagccagtgcagtcgggttagcaaagctcggtgcttcagtcatcagacacgctgccgccgtggttttcgggaaggcgataacgtcacggatattgtcggtgccggtcagcagcatggtcagacggtcaagaccgaatgccagacctgcgtgcggcggagtaccgtatttcagagcgtcgagcaggaagccgaatttctcgcgctgttcctcttcgttgatacccagaataccaaacaccgtctgctgcatatcaccattatggatacgtactgaaccaccgcccacttcgtaaccattgatgaccatatcgtaagcgttcgccaccgcattttccggtgcagctttcagttctgcagccgtcatatctttcggtgaggtgaacggatggtgcattgccgtcaggccgccttcaccgtcgtcttcaaacatcgggaagtcgataacccacagcggtgcccatttgctttcgtcggtcagaccaaggtctttacccactttcaggcgcagtgcacccatcgcgtcggcaacaattttcttgttgtcggcaccgaagaaaatcatatcgccatcttgcgcggcagtacgatccaggatgtcttcgatgatttctgcattaaggaacttcgctaccgggctgttgataccttccagacctttcgcgcgttcgttaactttgatgtaagccagacctttcgcgccgtagattttaacgaagttaccgtattcgtcgatctgcttacgggtcagcgatgcgccgcccggaacgcgcagagccgctacgcgacctttcggatcgttcgccggacctgcaaatacagcaaactcaacagatttcagcagatcagcaacgtcagtcagttccatcgggttacgcagatccggtttatcagaaccataacggcgttctgcttccgcaaaggtcattaccgggaaatcgcccagatccacacccttcacttccagccacagatgacgcaccagcgcttccatcacttcacgcacttgcggcgcggtcatgaaagaagtttccacatcgatctgagtaaattcaggctgacggtcagcacgcaggtcttcgtcacggaagcatttaacgatctgatagtaacggtcaaaaccggacatcatcagcagctgtttgaacaactgcggggattgcggcagtgcgtagaatttacctttgtgcacacgagaaggcaccaggtagtcacgcgcgccttccggcgtggctttggtcagcatcggagtttcgatgtcgaggaagccgtggtcatccataaaacggcgcaccaggctggtgattttagcgcgggttttcaggcgctgagccatttccggacgacgcaggtcgaggtagcggtatttcagacgcgcttcttcggtgttgacgtggttagagtcaagcggcagaacatctgcgcggttgatgatagtcagcgaggacgccagcacttcgatttcgccggtcgccatatcgcggttaatatttttttcgtcacgcgcacgtacggtgcccgtgacctgaatgcagaactcattacgcagttcagaggccagctttaacgcgtccgcacgatccggatcgaaaaatacctgcacgataccttcgcggtcgcgcatatcgatgaagatcaggctaccaagatcacgacgacggttgacccaaccacacagagtcacctgctgccccacgtgggacaaacggagctgtccacaatattctgtacgcatgagatatcccttaacttagctgccggcggatgccccctgctgcgcaggtgaccaagtcgcagcgttagctgtatgtcacaactgaatgaaaaaaggcggctattatactggaaattctgccgcaccgtaagagcctggcccgcgctggaacgcctcgttaccactttatatcgggcctgaaatcagactctacgccagtttgctataaaggtgttgcccgaactcataaaaattaacaaaatttgtcgttccgccatcggctaatcgcattaaggtgtgaggcacgattttgttttttcaggagtcattatgcttgaacttaatgctaaaaccactgcgctggtggtgatcgatttacaagaaggcatcttaccttttgccggtggtccacatactgccgatgaggtagttaatcgcgccgggaagctggcggcgaaatttcgcgccagcggtcagcccgtgtttctggtgcgcgttggctggtctgccgattacgctgaagcattaaaacagccggtcgatgcgccctcaccggctaaagtgttgcccgaaaattggtggcaacatcctgctgcattaggtgcaaccgacagcgatatcgaaatcatcaaacgtcaatggggtgcgttttacggtacggatctggagttgcaattacgccgccgaggtatcgatacaatagtgttatgtgggatctcgaccaatatcggtgttgaatccaccgcccgcaatgcctgggaacttggctttaatctggtgattgccgaagacgcctgtagtgccgccagcgccgagcagcacaataacagtatcaaccatatctacccgcgcatcgcccgtgtgcgtagcgtggaagagatcctcaacgcgttatgatttacatcggtctaccgcaatggtcgcatcctaaatgggtgcggttggggatcaccagccttgaagagtatgcccgccactttaactgcgtggagggcaacaccacgctttacgccctgccgaaacccgaggttgtcctgcgctggcgtgagcagaccacagatgacttccgcttctgttttaagtttccggcgaccatttcgcatcaggcagcattacggcattgcgatgatttagtgactgaatttttgacccgcatgtcaccgttggctccgcgcattgggcaatactggctgcaactgcctgccacattcggcccacgggagctgcctgcgctttggcattttctcgattctcttcctggcgaatttaattatggcgtggaagtccgccatccacagtttttcgccaaaggagaagaggaacaaacgcttaatcgcggtttacatcagcgcggcgttaatcgggtgattttagacagccgcccggttcatgcagcacgtccacacagtgaagctattcgcgacgctcaacgaaaaaaacctaaagttccggtacatgctgtactgacggcgacaaatccgctgatccgttttatcggtagtgatgatatgacgcaaaaccgggaattatttcaggtctggttacaaaaattagcgcagtggcatcagaccactacgccttatctttttttacatacgccagacattgcccaggcaccggaactggtacataccctgtgggaagacttacgtaaaacgcttccagagatcggagcagttccggctattccacagcaatcttctcttttctgaatttgccacctatcatagacaggtgccatcggccattttaaagggagtttgtatggtaagcgcgctgtacgccgttttaagtgcgttgttattaatgaagttctcttttgatgtcgttcgcctgcgaatgcagtaccgcgttgcctatggcgacggcggttttagcgaactgcaaagcgctattcgcattcatggtaacgcggtggaatatattcccatcgcgattgtgctgatgctgtttatggaaatgaatggcgcagaaacctggatggtgcatatttgcggcatcgttttgcttgctggtcgtctgatgcattattacggttttcatcaccgtctgttccgctggcgacgttccggcatgagcgccacctggtgtgcgctgttgctgatggtgctggcgaatctttggtatatgccctgggagttggttttctccctgcgttagcgcacaatacgccactttctttttcccggatttttacgttatgtctcaccgcgacacgctattttctgcccctatcgccagactgggcgactggacctttgatgaacgggtagctgaagtcttcccggatatgatccagcgttccgtacccggctattccaatattatttccatgattggtatgttagccgagcgcttcgttcaacctggtacgcaggtttacgatctgggttgttctctgggcgcggcgacgctctcggtgcgtcgcaacattcatcatgataattgcaaaattattgccatcgacaactccccggcgatgattgaacgctgccgtcgtcatattgacgcctataaagcccctacgccagtagacgtcattgaaggtgatattcgcgatatcgccattgaaaacgcatcgatggtggtgctgaattttaccctgcaattcctggaaccttccgagcgccaggcgttactggataaaatttatcaagggctgaaccccggcggcgcgctggtgctttcggaaaaattcagtttcgaagatgccaaagttggtgaactgttgttcaacatgcaccacgactttaaacgtgccaacggttacagcgaactggagatcagccagaagcgcagcatgctggaaaacgtgatgctgaccgattccgtggaaacccataaagcacgcctgcataacgccggttttgagcatagtgagctgtggttccagtgctttaactttggttcactggtggcattaaaagcagaggacgctgcatgatcgactttggtaacttttattctctgattgccaaaaatcatctttcacactggctcgaaacgctgcccgcgcagattgctaactggcagcgcgagcagcagcacgggttgtttaagcagtggtcaaatgcggtggagtttctacctgaaattaaaccgtatcgtcttgatttattgcatagcgttacggcagaaagcgaagagccactgagcgcagggcaaattaaacgcattgaaacgctgatgcgcaacctgatgccgtggcgcaaagggccgttctcactgtatggcgtcaacatcgataccgaatggcgttccgactggaaatgggatcgtgttctgccccatctttctgatttaaccggacgcaccattctggatgtcggctgcggcagcggttatcacatgtggcgcatgattggcgcaggcgcgcacctcgcggtggggatcgaccctacgcaactgtttctgtgccagtttgaagcggtgcgtaaactactgggtaatgatcagcgcgcgcatttgttaccgttaggtattgaacaacttccggcactgaaagcctttgataccgtcttttcgatgggcgtgctttaccatcgccgttcaccgctggagcatctatggcagttgaaagatcaactggtcaatgaaggtgaactggtgctggaaacgctggttattgatggtgatgagaacacggtgctggtaccaggcgatcgttacgcgcaaatgcgtaatgtctatttcatcccttccgcgctggcgctgaaaaactggctgaagaagtgtggttttgtagatatccgcattgcggatgtgagcgttaccaccacagaagagcagcgacgcaccgaatggatggttaccgaatcgctggccgatttcctcgacccacatgatccgggtaaaacggtggaaggttatccggcacctaaacgcgcggtgctgattgcgcgcaagccgtaaaggtctggtattactgccggatgcggcgtgaacgccttatccggcctacaaaaccttgctaattcaatatattgcagggactatgtaggcctgataagcatagcgcatcaggcagctttacgtttgcataacctcagcgcccgtttccgggcgctattcacgtcttacgcctgaacagctggctgatcaaacgccgttaacttcggtgcattgcccgtatatttttcgatatacaccaacgctgagttaccggcacaggcatttgccagctgcgagctggggatatccgccgttaacacgttcgcactgccgtttttacacaagccattttccagatctggccatgcaccttcatgcacgcataccacgccttttttgatcccgtcagtcaccaccgcgcctgtcaaaatctgaccacgtttgttccagacacgcaccagatcgccattcgcaataccaaagcgtgcagcatcttcggtgtgaatagtgattggttcacgatcggcgatcgcatattttttacgcagttccgcatagttaagctgactgtgtaaacggtgtgccggatgtgcggtcagaagctgtaactgcttctcgtcggcggtacctttccattcatcaggagccagccaggttgggtgtgccgggcaatccttatagccaaatttttccaacgtttttgaatagatttcaattttgccgcttggcgtacccagcgcatttttcaccggatcggcgcggaaatcaccataacgaacgtactgttcgttcttctcgctgtggcgcatttcgatcagtttattttgctgccagaaggcattaaacattggcatagtgacgcgttgcgcacgggcacctttctgagcggcatcatagaaaaatttcagccacgccatttcatctttaccttcggtatagatctcttttccgccaggtttgagtaattccgcaagatcggcaaacacgtcaaaatcgttacgcgcttcaaattgcggagcaacagcctgcttcatcggcacaatatgctggttgctgtaatcaccggtcatcgtcaagtcattgcgctcaaacgatgtggtgatcggtaatacgatatctgcgtgtttggctgctgcggtccagtagcattcagaaacgacgatcatctccggtttctgccatgctttaatcagacgattagtatcctggtgatgggtaaagttaccgccacccgcccaccagatcattttgatattcggatacgtttgttctttaccgttatgctgatatttgccgccaggattttccagcgcatcgacgatacgggcaacaggaatcgccgtcattccgccatcatcagcggcctcgctggcatgtccggcaatcgccgcagacatttccggcagcacgccgccaacacgcgtcgggttgccaccgttggagtaatgataagagaaaccaaaaccgccgcccggtgtaccaatctgccctaacatcgccgccagcgtcaccagcatccagtgtttctgttcaccatattgctggcgctgaattccccagcctgccatcagcattgtgcgattcgccgccatcagttcagcgagtttgactatctgcgcttccggtacgccagtaatttccgccgcccagaccgcgctcttcggcgtattatcgctcttacctgtcagatactcttcaaactgcggatacccggtagtgtatttttcaaggaacactttatcgtgtttgccttgtgtcatcagggtatgcgcaatccctaacatcagtgccacgtcggtgcccatattcggcgcgatccaggtggcattatcgtcaaagaattcgatggtttcggagcggataggatcaatggcaatcactggtttgccagattttttcagctgatggaagtattccagcccttgctcatcggtactgctccaggcaatttttaaggtattcagcgggttcattccccacagcaccacaacctggctgttttccagaatcagcggccaggaggtctgctgttcatacacctctacagaaccgaccacatgcggcatgatcacctgtgctgccccggttgaataatcgccgctatgcccggaataaccgcccgccaggttcatataacgttgcagtaaggtttgcgctttatgcaacacgccagaagagcgccagccgtaagatccggcaaaaatggccgatggtccgttagctttacgaatacgatcatgttgctcatgaatcagttttaatgcctgttcccagctcacctgtacataggtatcttcgccacgacctttcgccggttgcagtggattatcgagatagctttttctcaccatcggatgctgaatacgcgccgtggtgtgtacctgatccgccgccgtagactgtaaggaattcggtatggttttcgccagcgcgcctgttgaagaaacaatcttgccgtccttcacttctacgttcatcgctccccaacgtcccgcggtgaggattttaccgcccttctcttctgcccatgcggggagcggtgctgccgatgtcaccaccagcgctccagcggcaataccgctgtgtttaataaattcacgtcttgttaatgtcataacttcctccctgatcaacgaggatcactgtttctcggtaatatctttggcgttgtactggaaataccgcgttaaaatgtccagttcgttttcgctcatgctggttcgtgcccccattcctttggcaatggacggccacgcattgacggtgtaatggtcggcggcaataggggcatgacaaccagcgcaataggtatcgtcaagtttttcagcgtattgccatagcggtttacggtccgctaatgcgggatcggtaagcgcaccctgtaaagacgcctgacgccattgattgccgtattcgtcagcctgccattccccgtttacagtgagcgccttgataccttcttcacttaatgtggctagcgccagccgttgacctgccgccaggtagagcgtgttttcactgccctgcatttgataaccctgcaacagaacgatcggctgtttgccactggcatcaacgacggtgagatcggttccaggattcacggtagccagctcgcctatgtgagaagttttgaaaggataaatatgtgcgccattagtaactgaagtagcggcctgactttccagctcatgcgccgcgttgtcatccatttttatttctggcggaaaatgggcaatgcctttatgacaatcgatacaggtttcgctgtccttttgtgctttgttatgcattttctgcgcagattcactttgcgaggcaatatccatggcatcaaaagaatggcaactacggcacgttgcagagtcagtggcttttaattctttccatactgtttcggccatttcctggcgatgagcttcgaacttatcgtcactgtctattttgccgctaacaaattcatgataaatatctttagatgcctttaatttagcaaataaataatccatccctgactttggaatatggcaatcggcacattccgcacgtatccctttctggttcgaaaagtggacagttccctgatattcctcaaaaggtttactcatcgagtggcaggaaaggcaaaatgctgtatccgacgttttatgtaagactttttgcgccagcaataacccgccgccaccaaccacaaccgctatcagcaaaaacaataacccaatgcgttttttccctcgcatagattcctctaattaaattactggacaccgaaatcattgtataattaaatatacaacgaattaaccgcttgcataattaggcacaacactgcctgaaacaatcgataaagaatatgatttattacaatgtaatcattaattgctaaggaataacccagttgctatttagaatatatatttatcagttttagtaatttaaatcccataattaatgtgaatatatacaatatttttagcacaacgctatgcgcactgtcacccgctcaacagatcacggttatcgttcgttttttatactgttcagggataaaaaaaggcccctgttgaaattgcaggggcctggtacgagcaagcatcatattgggcgacatgatgcaacggtaaaaatcatttggcctgatggcgttcaatgattcctttcatttcagcaaccgccgccccgtctacgatataacgcgaatactcgtccgcgtgttcatctgatgacatggacaatccttgattacgataacgcatcggtgaggcttgccacgctcccgcggagctatggacttccagcactccggcatcgaggaagtggtgcaggttttctgcacggactcctgctccggccataatgattggagcatcacgatgggcaataagttccataatttttgataaaccttgcagtgcgtctgatttttgccctgatgtcagtacccgggcaatgcccaattccgcaagattattgagtgtatataaagggttagcgcacatatcgaaggcgcgatgaaaagtcactgccagcggaccggcagcagccattattttttccattcgtggcatatcgacattcccgtcaacatcgagaacgcccgtcaccagtccaggaaaacctaattcgcggaccgtgcgcacatcctcaagaatggcggcaaactcaccgtcgctgtagcaaaaatcaccaccgcgtgggcgaattatcggatgcacagggatcgtcacccgctggcgcacggatttcagtacacccaacgacggcgttaagcccccctcttttggggctgcgcataattcaactctgtctgcgccgttttgctgcgccgttagtgcacattccatgctgtaacagcaaatttccagtaatgccatttttactccttaattacgccgactgctcgctggcaacgatctcttcaatggaccacggatgaaacttaatagttgttttgccatcggtgaccgccagcgtcggattcggtaatcgctcatgctcaccttttggcgaactggttttcactgagatccccggtaggctgagtccttcatcagaaagcaatgccagcgcacgggcattcagcgtttctggatcacccggcagaacgatttcaatatgttcccaaccttcgtgtgggtaacgtttttccccgggccacggtagctccacaatagaaaactgccagtgcgcaacctgtaccggttcatgcaatttaaacagacaaatcggtctgccattgatcatattttctgacaaaagctcgccacactgttcaaacccgcgacgccagcgttcagcagtggcgttttgatggcaacgcaaagaaatgtgatcggcagtcagcggagtgatattcaaccccagacggcgggaaagttcatctaatgcgtggataaatcgcggtaaatccgatgcaatatcctgcagctcgtcgatagattgccagttcgccataatcactcttcgtctttcagtaaaagcgttaatttaccctgttgccctgtgccaaccaaccgctgatttcacgccgcttctgatgcaatagtgaaaacggcaatacgccacgcgcacgttgctgacgaaaacagccatttgcagtatactcccgccctaatttctttaactggtgcgggcaatttttgctcgcttcatcaatgtaaggtattccggtgaatattcaggctcttctctcagaaaaagtccgtcaggccatgattgcggcaggcgcgcctgcggattgcgaaccgcaggttcgtcagtcagcaaaagttcagttcggcgactatcaggctaacggcatgatggcagttgctaaaaaactgggtatggcaccgcgacaattagcagagcaggtgctgactcatctggatcttaacggtatcgccagcaaagttgagatcgccggtccaggctttatcaacattttccttgatccggcattcctggctgaacatgttcagcaggcgctggcgtccgatcgtctcggtgttgctacgccagaaaaacagaccattgtggttgactactctgcgccaaacgtggcgaaagagatgcatgtcggtcacctgcgctctaccattattggtgacgcagcagtgcgtactctggagttcctcggtcacaaagtgattcgcgcaaaccacgtcggcgactggggcactcagttcggtatgctgattgcatggctggaaaagcagcagcaggaaaacgccggtgaaatggagctggctgaccttgaaggtttctaccgcgatgcgaaaaagcattacgatgaagatgaagagttcgccgagcgcgcacgtaactacgtggtaaaactgcaaagcggtgacgaatatttccgcgagatgtggcgcaaactggtcgacatcaccatgacgcagaaccagatcacctacgatcgtctcaacgtgacgctgacccgtgatgacgtgatgggcgaaagcctctacaacccgatgctgccaggaattgtggcggatctcaaagccaaaggtctggcagtagaaagcgaaggggcgaccgtcgtattccttgatgagtttaaaaacaaggaaggcgaaccgatgggcgtgatcattcagaagaaagatggcggctatctctacaccaccactgatatcgcctgtgcgaaatatcgttatgaaacactgcatgccgatcgcgtgctgtattacatcgactcccgtcagcatcaacacctgatgcaggcatgggcgatcgtccgtaaagcaggctatgtaccggaatccgtaccgctggaacaccacatgttcggcatgatgctgggtaaagacggcaaaccgttcaaaacccgcgcgggtggtacagtgaaactggccgatctgctggatgaagccctggaacgtgcacgccgtctggtggcagaaaagaacccggatatgccagccgacgagctggaaaaactggctaacgcggttggtattggtgcggtgaaatatgcggatctctccaaaaaccgcaccacggactacatcttcgactgggacaacatgctggcgtttgagggtaataccgcgccatacatgcagtatgcatacacgcgtgtattgtccgtgttccgtaaagcagaaattgacgaagagcaactggctgcagctccggttatcatccgtgaagatcgtgaagcgcaactggcagctcgcctgctgcagtttgaagaaaccctcaccgtggttgcccgtgaaggcacgccgcatgtaatgtgtgcttacctgtacgatctggccggtctgttctctggcttctacgagcactgcccgatcctcagcgcagaaaacgaagaagtgcgtaacagccgtctaaaactggcacaactgacggcgaagacgctgaagctgggtctggatacgctgggtattgagactgtagagcgtatgtaatcgatttttcgtgagagtgaagcctgatcagggttagccgatcaggcttttttattgccatctaaatgtattctgaaaatggacatgccattgttttctcactgttggataagaggccagaagcgtaatatccggccccagggaaacgataacggttgaatttaaggaataccgcagtgtttaaatttcttgtattaacattaggcattatctcttgccaggcttacgcagaagatacggttatagtaaacgaccatgacatttcagccatcaaagattgttggcaaaaaaattcagatgatgatactgacgttaacgtgatcaaatcatgcctgcgacaagaatacaatctcgtcgatgcgcaattaaataaagcctatggtgaagcttatcgttatatagaacaagtgccacgcacaggtgtaaaaaaacctgataccgaacaacttaacttgcttaaaaaatcacagcgagcctggctggattttagggacaaagaatgtgaattaatcctttcaaatgaggacgttcaggatttaagtgacccttattctgaatcagaatggctctcatgtatgatcatacagaccaatacgcgaactcgccagttgcagctataccgtaactctgaagatttttatccaagccctttgacaagaggataattcacatctttttggcatgttttgttgcaagctattcctgataaataattgcaacaagacatcgagcctttttcactgagttattaaacatactcgcgagcgcgtaatttttttgtccttcagcgataattcacaatcacttcattacgttgtacctttagcggtggaattaaccgcccaccgcctggcacttcccagataaatcgcaacggttctgctgccgctataccggaaaaggccacggtggttccgctctgcccctctaattcgacacaacgagattgcgaacacaagcgaacccgcagtcctgaaggtgtcgggccgataagctgataacgccacgctaccagcgtcatcaatcctgaagcaggttgtcgcgtagaaagaggcgcagacgacatcgactcaccgcgatgatttagcgtaattcctacactacttgcctgccacatcccctccccggcggcttgcaccagcagcggaaacaataatattgctaataaggttctcattatttgccgccaattgtcgccgtcatgcggatatgtcggttatcagacagttccagattcgacaggaccactaactgcggcaagctgcggcgcaggaagcgagacaataatggtcgcagcgcgtggttcaccaacaatactggcggcgcacccagcatctcctgacgggatagcgcttcctgagtttgcgccagtaaacgatccgccagccctggctccagtcctcccccgccctgcagcgcctgtagtaacaaacgttccagcggtgtatcgaggccaataacatggacttcatctttgccaggaaaccactgctgggtaatcgcccgtcccaacgccacgcgcacgacggcggttaattcatgtggatcgctttggatgggcgcatgttccgccagcgtttcgagaatggtgcgcatatcgcgaatcggtactttttcatcgaggagattttgcagcactttatgcagtgtggtgagcgtgacgacgccaggaacgagatcttccgtcagctttggcatctcctgggcgacgcgatccaacagctgttgcgcctcctgacgaccaaacagctctgcggcatgctggctaatgaggtggttaagatgcgttgctaccaccgtgctggcctcaaccactgtgtacccctgaatctgcgcctgttcttttagcgcactttcaatccagatagcattcaggccaaatgccggatcgacggtcgcctcaccaggtaacgtcccggcagcggttccagggttaatcgccagccagcgccccggataagcatcaccactgccaatctccacgcctttcatcaaaatgcgatagcgggcaggttgcagatccatattgtcgcgaatgtgcaccactggcggcagaaatcccatctcctgggcaaatttcttgcggatactgcgtatacggcccaacaactcaccatcctgctggaaatcgaccatcgggatcagtcgataacccacttccattcccagagaatcttccagttgtacatcgttccacgtcgcttcgacaacggtattattctctgccatttttaccggtttgggttcggcaggcgctttttgttcgcgtccgcgtatccaccaggccagcccgagcaatccggcagtgaacagcaaaaataccaggttcggcattccaggcaccaggccgagtaaaccgagcacggcggcgcttaacaacataacgcttgggttactgaaaagctgattcaccatctgctcgccaacatcctgatcggtgctgacacgcgtaacgatgacccccgcggcggtagaaatcaccagcgccggaatttgtgccaccagaccgtcgccaatggtcaatagcgtataactttccgccgcgtgtcccatgctcatgccatgttgcagcacgccgaccagcaacccgccgacaatgttaatgaccatgatgaggatcccggcgatggcatcgccgcgaacaaacttacttgccccgtccattgagccgtaaaaatcggcttcctgagtcacttcggagcggcgttttttcgcctcatcttcaccaatcaatccggcgttaaggtcggcgtcaatcgccatctgcttacccggcataccatcgagaacaaagcgcgcacccacttctgcgatacgcccggcacctttggtaatgaccataaagttgatgatcacgagaatgacaaacaccacgataccgatagcgaaattgccaccaacgaggaagtgaccgaacgcttcgaccaccttccctgccgccgccgcgccggtatgcccttccattaaaatgatacgggttgaagccacgttaagtgccagacgcaacagcgtggtaaacaacagaatggtcggaaacgcagcaaactcaagcgtgcgctgggtaaacatcgccaccagcaacaccatgatcgacaaggcaatattgaaggtaaacaacaggtcgagtatgaatgcgggcagtggcagcaccatcatcgacaagatcaacaggatcaaaatcggtccggcaaggatctgccattgtgtcgatttcaggtttgcgggcaggcgcagcatcgcggccagattactcatgggtcggtttctcgttaataaaatccagggcttccggcaccggaagatgagtaggttgtacagggcgctgtccaccagccagacgccagcgtttcagttgccagacccaggccagcacttccgccaccgcggcgtacagttgacccgggatttgttgaccaatctccgcatgtcgatacagcgctcgcgccagcggcggcgcttcaagcgtcgggacgttattttcagcgccaatttcacgaatgcgcagcgcgaccagccctgcacctttagcgaccactttcggtgcgctcattttgttttcgtcatactgcaacgctaccgaatagtgggtcgggttattgacaatgacatccgctttcggcacatcggccatcatccgacgccgtgcagcagctcgctgcatctgacggatccgccctttaacatgagggtcaccttcgctttgtttgaactcatcacgaatatcctgccgtgacatacgcagctttttcaggtggctgaatatttggaaaaagacgtcaaatcccaccattggaatgacaccaagcaccaccagcagtgcgcatagccctaccaaatccatcgcattacccatggcggtaatcggagactcggccatcaagcgcatcatctgcggccagtgatgccagagaaaaaaccccgtcacgctgccaaccaggatggttttcaaaattgctttaagcaactccgcgccagtctgagccgagaacatccgtttaatgcccggtagcgggttgagtttggaaaacttcggctgcaaggatttgccgctaaataccagccctcccagcatgaccggagaaatgagcgccaccagcaccacgccgctaatcagcggcagcagcgccagcatggcttctctgatcagcagaataatctgcccgaggatcagattcgggtcattgataatactgtgatcaaaatgcagcccagcggagagcatgcccgacaatcgacgggccagcgacacaccgccaaaccagataacactaacgcccaccagcaaaatcagcagtgaggtcagttcacgggaacgcgggatttgcccctcttcccgcgctttttctagtcggtgaggtgtgggggcttctgttttgtcgtcgctctcgtcagacacgtcgccaatcctggaaagagtattaagcgtgaatgatgccagagcgcaaagcgttcaatggtttgagtaaggggcaaaacaggcgggatttagggcttttgctgccacacatcaagcatagtgtgcgtttgtcggatgcggcgtcatcgccttatcagaccgcctgatatgacgtggtcacgccacatcaggcaatacaaatcaaaatccaagactatccaacaaatcgtccacctgatcctgactggctaccacaccggctttgctggtatcgacctgaggtccattaagcaaactctggttttcacgttttggacgcgactcctgttccgggatgttttccaacagcaccatcagcaactggcgttcgatctcctgaatgacatccatcatccgcttaatgacctgcccggtgagatcctgaaaatcctgcgccatcatgatttccagcagttgcgcgttagtaaagctggtatgcgcgggtacatctgccagaaattgtcgtgtatctgttaccagttcacgggcgtcggcaaggtcaatcggatcggcaaaccagtcatcccaacgttgggttaacgcttttgctgatttctccatttgatcctgatgcggttgtgacgcctcaacactgttcagcgcccgctccgcagcctgggcggtcatctgcacaacatagtacaaacgatcgcgcgcatcggggatggcttccgccgcttcggcaatggcctgatccagccccagttcccgcaaactgtcgcgcagcatacgcgtcaggctgccgatgcgcgcaatgatatcgccagctgaatgctcgtcagcaggtttgattgatggttgcatcatagtcgcatcctcacatgcccagtttctcaaagattttgttgagtttttcctccagcgtcgcggcggtaaatggcttcaccacatagccactggcccccgcttgcgccgcagcaatgatgttctctttcttcgcttctgcagtcaccattaacactggcaatgccgacatcgcgccatccgcacgaattgttttcagcaattccaggccatccatattgggcatgttccagtcggagataacaaatccataaccgcctgcctgcaacttattgagagcgtcgacgccatcttccgcttcctcaacattattgaatcccagctctttcagcaggttacgcactatgcgtcgcatggtggaaaagtcatccacaaccaaaaatttaagttctttatccgccatttcacactcctgatttaaatacgtatcgcctgtccggcactaatttttgccaacatttgctggcttacctggctaagatcgaccacttcgcagacaccacccatattgatggcctcgcgcggcatgccgaacaccacgcaacttgcttcgttttgcgcaagggtccatgcccccgcctgacgcatcgccaacattcccgccgcgccgtcgttgcccataccggtcaggatcaccccaaccgcattacgccccgcctgtttggcgacagaatggaacaacacatctaccgaaggccgatgacggttaaccgccgggccatcgtgaattttgatttggtaatttgcgccactacgcgacagctccatatgccgatcgcccggcgcaatataggcatgccccggcaagacacgttctccgtcttcggcttctttaaccccgatctggcaaagcttattaagtctgtcggcaaaagagcgggtgaaaccgggcggcatatgctgggtaattaacagtgccgggctggaaagcggcaacggttgcagtacgtgacgaattgcctcagttccacccgttgaagcaccaatcgcaatcagtttttcagaactcaacaacggccccgccttcagcgttgtcggtgccgacaatggcttatgtgctgcaaggctcgcctttgctgccgtacgcaccttttcagcaatcatttcgttatacgccagcataccttcgcgaatacccagttgcggtttggtgacaaaatctatcgcccccagctccagcgcgcgcagcgtgacttctgaccctttgccggtcagggaagaaaccatcacaacgggcattggacgcaaacgcattaatttttcgaggaaatccagtccgtccatccgcggcatttcaacatccagcgtcagcacatcgggattgaatttcttaatcaagtcacgcgcgaccagcggatcaggcgcggtcgccaccatttccatgtcgctatggctgttgatgatttctgtcatgatctggcgcatcagtgccgaatcatcgacagataacaccctgattttgctcatcgttaatccttacttagcgcatacaccgtctgaccacgcagcgtgaagcggcgctcaaggtggctaaagttttcagagtgacccgcaaacagcaatccgtcgggtttaaggagcggaacaaagcggcgcaaaatctcctgctgggtagtttgatcgaagtagatcatgacgttacgacagaagatcgcatcaaacggccccggcacggtgtactgtttcgccagtagattcagcggggcaaaatcaacatagttcgccagctcctgacgcacgcgtaccagcccttcatgcggccccgtccctcgcatgaaataccgttgcagttgctgcggcgtcaggtttttcaactcttcatggcgatagataccgcttctggctttttccagcacttcggtgtcgatatcactggcaaacactttccagcgtccgggcgcggtgcccaatgtgtcagccagcgtcatcgcaatgctgtacggctcttcgccggtcgaagccgccgcgctccatacgcgatactcgccagaacggcgacgtgcgtgatccgcgagcagagggaaatgatgtgcctcacggaaaaatgccgtcagattcgtggtcagcgaattgataaacgcctgccactcaccgctgtgctgattagattccagcaagttcagataatgaccgaaatccgtcagtcccagcgaacgcaaacgacgaaccagtcggttgtaaaccatgtcgcgtttatggtcagccagaacgatcccggctcgttgatagatcaattgacttatccgccgaaaatgcgcgtcggaaagcgccaggcgctcggtcatctgtaacaataaagacgtttgcccacagggcagagatgaagtcatagcgccttctcaatcacttcaggataccactggcgcaatttgtaactgcaccgactcatgtcgtgctacttcatgttcttcaagggtaaataccgccacacgcgacgaaagatggtcggcctgattcgccagttgttccgttgccaccgccgcttcttctaccagcgaggcgttctgctgagtcacctgatccatctggctgacagcctgtgcaacctgctcaatcccccgctgttgttcttccgacgcagaggcaatttctcccataatgtcgttcacgcgggtcaccgaactgacaatatcgatcatggtcgcggcggcgttattcaccagtttcgaaccctgctggacacgattgactgactcttcgatcagccctttgatctcttttgctgcctgcgcgctacggctggcaagattgcgcacttcacctgccactaccgcaaaaccacgcccctgctctccggcgcgagccgcttccactgccgcattcagggccagaatattggtctggaaagcaattccgtcgataacgctgataatgtcgccaattttttgcgagctggtggcgatctcctgcatggtgtgagtcatggtactgacctgaacaccgcccgcctgcgccgttgtcgcggcattttttgccagttccgacgcctgtcgtgcgttatcggcgttttgccctaccgtggcggttaattgctccatactggcggccgtttgtgccagcgatgccgcctgctgttcggtacgacttgagagatcgttattgcctgcgacaatctccgcgataccaatgtgcatctcctggcttcccttacgcacatcacttaccgtcccacgcaaagcctgctgcatggtcttcagactggcaaaaatggcggtgatctcattacgaccatataccgcaatcggacgcgccagattacccgcagcaatgctgtcaaaatggctaccgataatggccagtggttgaacaatcatcttgcgcgtccaccacagcgcactgctgatgtagatcgccgcaacaataatcatgctgataaacaccagtgccgaaatctgatagttacgctggctttgcgcactggcggcttccagcacatggttgatctccagctgccaggcctcaaagttaacgtcaaacgcattctgtgatccctgcaccggcgcagtgaggaaatccgaaagttgattactttcaagccaggtcgcctgatgttcgagatcgttgtgccagcgggcaaaacttttctccgtctctttttgcaatcccctgacgtgctcgttgcccgcagtcatcgccataaaacttttaaacagcgtggtggattgcgtcagactggcgcgcgccgtcgtcatcaacgttttaatgtcatccgccggatagctaagtgccgtcagagtgcccgctttgttcagcgcggtactggcctgtaacattaccgcccgagtttgcgctaatgccgcacgttgctgattgctctgctcgacctgattcagtcgttgcaaatcgtcgcgaaatgcccaaaaagacatgccgttactgccaatctgcaagatcccgcagagaatcaaaattaaaaacagcgtggtcgaaattcgaatacgattaaacatcaacgctccccatcaggcggcaatgaccgcgttagtaaatactcgtcaaaatgtttcccagtttggatcttgttcagcaattcgcagtcgtggctgagccggtggttgctcactggcaggacgggatggtgtttgcggtttattggtgagtgggctggctgccagacggaacgcggaaactgcttgcgttaaacgactcgcctgttcttccagcgcagcggcggcggcagctgattcctgcaccagcgatgcgttctgttgcgtgacgcgatccatttccgaaaccgccaatgcgacttgatcgatgccacggctctgttcatccgatgccgatgcaatctcgcccataatgtcagtcacgcgagtgacagcattgacgatattgttcattgtttccccggcgctttcgaccagcaccgaaccggtatcaacgcgtgagacggagtcttcaatgagggctttgatctcttttgccgcctgggcgctgcgactggcaagattacgcacttcacccgccaccacggcaaaaccacggccctgttcacccgcacgcgcggcttcaaccgcggcattcagcgcgaggatattagtctggaaggcaataccgtcgataacgctgataatgtcggcaattttcttcgaactatcggcgatctcatgcatcgttttcactacgccatccaccactttgccgccgtgctgggcggtgtcggaggcactttgcgccagttgcgaggcctggcgggcgttatcggcgttttgcttcactgtcgcggtgagctgctccatgctggcggcagtttcttccagcgcggatgcctgctgttcagtacgggaggaaagatcggtgttgcccgccgcaatttcacgggtaccggcatagatggcatctgaaccttcgcggacatgagtgacggtgtcagtcaaagagcgttgcatatgtgaaacgctctgcgccaggtcgcccatttcactgcgcccgtcaatggtcagggtattcgccaggttaccaccggcgatttcgcgaatgtgagcaataatttttgccagcggagtaagcaacatacggcgaatgccgtaccacgccaccagcagaatcaataccaccaccagcgcgataaccgccagttgccactgggcaaatcggtaatcatctgcgttgtcagtgacgatatcgcgatacagtttttcactgctgagggcgtactgagcaaacgcttcgcccattgcattttgcattccctgggttggctgagcgaaataagctccagtattgccataatctagataatcaatcagttcagttaacgctgtgtaatagtttttatatttttcatcaatattacgactggtagcgaccatttcaggtaacggtgccatgcttttgaattttttataatgcgtcgctgcctgcgccaatgttttcctggcgctatcgagcaattcaactttggcgttactttgttgattggaggaatccatcatcatccgtaccgctgaacgactcaggttaatgcgcgtttgcagcattaaatcccaggttgacgtcagctcgccctgctgttcccgtaattgattggaaaccacaaagctcttctggctatggtgaagggaagaaaaaaacagactgccggaaataagctgtaacagtgcgaatacccccagcaccattaccaacagcgtgactacgcggatacggttaatcataaggcaccttcctgaaaacaagttgatctcgttatcggcaaggaggggggaaactttattgctgatgccacccgccgcgaaattgaaataaaaaacccgatgcgcagatcatcgggttcatttcaattgaggaaatcgggagaattacgccacttctgacgccgcgctatctaacagcgccatctcttcgctgttcagcagtttttcgatgttcaccagaatcaacatccggtcgcccagtgcgcccagtccagtgagatattctgttgaaagcgtcacggcaaattccggtgccggacgaatttgctccgccgtcaatgaaagcacgtctgagacgccgtcaaccacgatgccgaccacccgctgtccgagattcaggacgataactaccgtgttgtcgttatagtccacatccacctggctgaacttaattcgtaagtcaacaatcggcacaataacgccgcgcagattcgtgacgcctttgataaacgctggcgtgttcgcaatccgtgttacctgatcgtagccacggatctcctgcactttcaggatatcaataccgtactcttcatcaccaagggtaaataccagaaattcctggcctgacggctcgctggccagctttgttacattcgtcataccggtcatattgttacctttttactcattcaggcggcggtgttcgccatacgttgttcgcggtttatcgcctgcaaggcggagacatcaacaatcagtgccacgctgccgtcgccaagaatggtcgcagcagaaatgccggggactttgcgatagttactttcaaggtttttaaccacaacctggtgttgaccaattaattgatccaccagcaaggcgtagcggcgaccgccactttgtaagatcaccacaattccctgggtggcttcggttttcgcgcccgcgacgttgaacactttccacagttcgacgatgggcagatattcaccccgcacttccagcacccgctcgccgccggccagtggatggagatcggcttcacggggttgcagtgattccataacagcattcagcggcagaatgaaaacttcatccgcaacgcgtacggacatgccgtcgaggatggccagcgtcagcggcagtaaaatgcggatcgtagtgccagtaccctgcttcgactggatttcgacatgaccgcccatcttctggatattacgtttaacgacgtccatgccgacgccgcgcccggagacgtcggtgacctgctctgccgtggagaagccaggtgcaaatatcagcatcgcgacttcgtcgtcgctcatgttttcgctgacagtcaaaccttgcgaggccgcttttgccagaattcgctcacggtttagccccgccccatcgtcggtcacttcaatgcaaatgttgccgccctgatgttcggcagacagaattaaatttccgacgctgtttttacctgcggcgagccgtttttctggcagttcaataccgtgatcgaggctattgcgtaccaggtgggtcagcgggtcgataatgcgttctatcaggcttttgtcgagttcagtagaactgcccaccagcgtcagttctacctgcttgccgagttttcccgccagatcacgcaccagccggggatagcgactaaaaacatattccatcggcatcatgcgaatcgacatcactgattcctgcaaatcacgggcgttacgttgtaactgccccatgctggttatcaaatcaccatgattaaccgggtccagttcgctggaacgctgggcaagcatggactgggtgataaccagctcgccgacgaggttaattaattgatcaaccttttctaccgctacacggatgctggtggattcattgctgcgcgtcgttttttcccgctccacgcggccggttggcgcttgttcggctgccagtttaagcactggtggggtggatatttttggcgagacttctactgtttcaaaggtaatctgatcggcttcaatcacaaaacagagtaccgctgtgatgtcatcttcggcgatgtcgcccggtaatattgccgagagcgaatccgcccctttcaccacgtcagttaacgttgtcagatgtcccagttcttcttccagcaggtcgacttccccggccttcaggcgcgaaaggataattcgtcgcggcgactgactgcgactctgctcatcttgcggttcacttttggcaaccacacttaatcgggtcactgcggatggcgtttcgcctttcgcttctaatgccagttgacgcaaggcctggcagatataatcgaagctggcggcatccggctcttgcgactgtttataagcgtcgagctgttcttgcatgatgtccttcgtttccaaaaacagattgataatgtcggtgttgagttgcatctcacctcgtctggcttcatcgagcaggttttccatcagatgcgtggtttcctgcaaaacgctgaagccaaaagttcctgcccctcctttgatcgagtgggcagcccgaaagatggcattcaattgttcggcatctggcgcttccggctgcaaaaccagcaaatgctgctccatgtcagccaacagttcgtccgcttcatcaaaaaatgtctgataaaaatcgcttatatccatgctcacgctgtcacctcggttcggctgatggcattgtgggaacactgacctgtggtgcaacctcaggtttttccagggcgcttactggctcattctggctttcggcgttttcatgcaaaatggcctgttcggcttgtttgttcagtaccagcaggctgatgcgacggttgacggcatcatcaggtccgcgatcgcttaagcgcatcgttgccgccatgccgacgacacgtaacactttgccgctatccaaccctccgaccatcagttcgcggcgggatgcattggcccgatcggcagaaagctcccagttgctatatcctttctcaccgctggcgtaggggaaatcatcggtatgacctgaaaggctaatacggttgggaataccgttcagtacaggcgcaatggcgcgcagaatgtcgcgcatatagggttcgacatcggcactgccggttctaaacatcgggcgattctggctatcgatgatctgaatacgtagaccttcctggaccagatcgattttgagatggggacgtaacgcccgcagtttcggatcggactctatcaactggtcgagatcaccccgcaatttccgcaatcgactttgctccatgcgttttttcagctcttcgatgttcggctgcttattcacttccccctggctttgggtgtaatcatcaccaccgccgggaattgggctttcactattagaaatgcgatcgccgcccgtaaccgcagtcgccagtggagtccggaagtactccgcaatctgaatcagctcttttgggctggagatggagatcagccacatcaccagaaaaaaggccatcatcgcagtcataaagtcggcataagcaatcttccacgatccatgtgctgccccgtggcttttggctttgcgtcgtttgacgacaataatcggatgcgcttgattcttcatgcttcctcggttgtcgtctgttgttgcggatttttcaccgcacgcacatgctcttccagttcaataaacgacggacgttcgctggaatagagcgttttgcgaccaaactcaacggcgataggcggtgcgtaaccgttcagattagaaagcagagtgactttgacgcactgcatcattttgctggtttcggcgcttttctgacgtaaaacagtcgctaatggggaaataaatccgtaagccaataaaatgccgaggaaagtccccaccatcgcatgtgcgataagcgcacccagctcggcggcaggacgatcggctgaacctaacgcgtgaacgacccccattacagccgcaacaataccaaacgccggaagtgagtccccgaccagcgccagactgttcgccgggacttctgcctcgctttcgtgcgtctcaatctcttcatccatcagagcttcgatttcgaaggtgttcatgtgaccgctgataatcaggcgcagataatcgacgataaaatcaagcatgacgctatccgcgaggatgcgtgggtagctggcgaagatctcgctctcacggggattttcaatatcacgttccagcgaaaacatccccatctgccgcgatttcgccatcaaccgataaagcagagccagcagatccatatacattgctttggtgtatttggagcgacgaaacagcaacggcagcgccttcagcgtgcctttaatcgctttgccattattgccgacgataaacgacccaatccctgcaccggcaataatcaccagttcagcgggttgatagagtgctccaaggcttccaccggtcatcaaataaccgccgaaaactgtaccgagaacaaccaggtaacctaataagataagcacgacatcatccttccactgttgaccatgacaggatgttcagtcgtcaggcgttaacgcgcgattggggcaaaaaaaagcagcggtacgtcgttaccgctgctggaatgttgcgcctcaccgtatcagttaaacagcctgtactctctgttcatccagcagttgtgggataatatcggcaggattctgggaaagtttacgtctttttactgcccgggatggcggttgacataagctgcaggcaaagctgccaacaggctggtgagcgtgggtaataaaattgccgccgcagcagttgcagctggaaagttgcagtaatccactttcaacaaaccgcaccaatgtccaggcacgggttaatgccagcagtggtccttcttctgcttgtgggcactgttcaaggtataaacggtaggctttgatcaccgcatcgacgccattacacaaaccggttttcagtaaaaactgccatgcattacagaacatcgaagcatgaacgttttgttcccaggtcataaaccagtcggttgagaatggcagcatgcctttcggcggtgggcttccgcgcagttctttataaagttttatcaggcgtccgcgacttaactgtgtttcgctttccagcatctgcaaacgagcgcccagggtgatcaattccattgccagctgaatatcccgcgcttcctgaacaatgcttttttcactcatgatcaggcccttttcttgcgcagcgcttcttcaggctgattaacatcattcagcaagcgtgttgagagcatgatgccggtatgaatttgctggagatcgtcaacgcgggaatcttgcgtcaactgagtaatcgtctggtggctgtcaaaacggaagtgacaaaccagttgattggtttctgccagcttaaccatttgcggaagagtcagtgccgctaacgttgtcgccatttcttcatttatgccgagacgaaacatagcggacgctttgtcctgaacaatcaaacgctgtgcaagtagtaaatatgacaagttgatgtcataaatgtgtttcagcaactcggaggtatgcattattcccacccagaataaccaactttatttttatgcggtttcaccgcaccccgtgatgtcgccgggaagccccggtaaaaaataattagcattagaatagttgcgataagctgcaataagcagaaccacctttttggtttaatatgtccttacaaatagaaatgggtctttacacttatctaagatttttcctaaatcgacgcaactgtactcgtcactacacgcacatacaacggaggggggctgcgattttcaataatgcgtgatgcagatcacacaaaacactcaattacttaaggaaggtgcgaataagcggggaaattcttctcggctgactcagtcatttcatttcttcatgtttgagccgattttttctcccgtaaatgccttgaatcagcctatttagaccgtttcttcgccatttaaggcgttatccccagtttttagtgagatctctcccactgacgtatcatttggtccgcccgaaacaggttggccagcgtgaataacatcgccagttggttatcgtttttcagcaaccccttgtatctggctttcacgaagccgaactgtcgcttgatgatgcgaaatgggtgctccaccctggcccggatgctggctttcatgtattcgatgttgatggccgttttgttcttgcgtggatgctgtttcaaggttcttaccttgccggggcgctcggcgatcagccagtccacatccacctcggccagctcctcgcgctgtggcgccccttggtagccggcatcggctgagacaaattgctcctctccatgcagcagattacccagctgattgaggtcatgctcgttggccgcggtggtgaccaggctgtgggtcaggccactcttggcatcgacaccaatgtgggccttcatgccaaagtgccactgattgcctttcttggtctgatgcatctccggatcgcgttgctgctctttgttcttggtcgagctgggtgcctcaatgatggtggcatcgaccaaggtgccttgagtcatcatgacgcctgcttcggccagccagcgattgatggtcttgaacaattggcgggccagttgatgctgctccagcaggtggcggaaattcatgatggtggtgcggtccggcaaggcgctatccagggataaccgggcaaacagacgcatggaggcgatttcgtacagagcatcttccatcgcgccatcgctcaggttgtaccaatgctgcatgcagtgaatgcgtagcatggtttccagcggataaggtcgccggccattaccagccttggggtaaaacggctcgatgacttccaccatgttttgccatggcagaatctgctccatgcgggacaagaaaatctcttttctggtctgacggcgcttactgctgaattcactgtcggcgaaggtaagttgatgactcatgatgaaccctgttctatggctccagatgacaaacatgatctcatatcagggacttgttcgcaccttccttaacataaatgtataagtcatacttttgttttgggtgtatttcaatctgttaaaaagtttttcgctacgctagcaagcaaaaatgaaacaggaataatcgaaatgggatgttgcgcacagtcaaaataactcaccgtaaataatcatctgctataaataatcactttcatgcaataccagataagctatttttaaacagacacttaccgcacaacaaactaattaaatacaaagaaaggcaacaatcaacttaatgttaatgaaatgttttacatatattaaccacttgtttaatgcggagaatcagtacactattttcttataattacatttgaaattatatgatcaccgggagtgattgattaattatctttactaataatcagactaatatttacctgtttgaccgagttgggattgcgtcgtttctccattaggagtaaagctttaatgtcacctgaagttcacagaataaggaacaggttatgagctatagcaatattcttgtcgctgttgcggttacaccggaaagtcagcaactgctggcaaaagcggtatctatcgccaggccagtaaagggacacatcagtttaattactctcgcttccgacccggaaatgtacaatcaattagctgcgccgatgcttgaagatttacgcagcgtgatgcatgaagaaacgcaaagctttcttgataagttaattcaggatgcggggtatcccgttgacaagacgtttattgcctacggtgagttaagcgaacatattctggaagtatgtcacaagcatcatttcgatttggtgatttgcggtaatcacaatcacagtttcttttcgcgagcatcctgctcggcgaaaagagttattgcctcaagtgaggtcgatgtgctgttagttccacttacgggagattaaccgctcctacgcaagctttggaaaggtagcaactttatcgcgctgctggctttccgcgcttcgcggaactatctgctttaggtcgctaatgaagcactcctgccagtggttaatatcgtttttcacgataacgtccagcatttctgcatgacgggaaatacgttccgccagcgacatagtcaatgcacgatccagcgcagctgcaacttcgtcacgatcgtaggggttaacaattaacgccgacgttaactcgtttgccgctcccgcaaattgcgaaagaacaagaacgcccggattggctgggtcctgagcagcaacatactcttttgctaccaggttcatcccgtcacgcagtggcgtcactaagcccacgtcagagtagcggaatattttcatcagtaatttacggtcaaaatgctgattcaaataataaagcggcgtccagcctaattgcccgtatttaccattaattcgtccagcttcattttcgagctgatgacgaatatcctgataggcttgcacatcaccacgcgacgttggtgcaatctgggtataacgaattttaccatgatgctgcggatatttttccagcaacgcttcataggcgagaaaacgctctggcaaacctttggaataatccagccgttcgacagaaaagatattttgtacgtttttcagttccgctttaagttgcgccagttttggcggcagtggcccggcagcctgtttggctatttctttcggttcaatgccgatcgggtagacttctgttcgaaatgctttgccccaggctgtatggctttttgcgctacgtgtcgtgacgcgggtcaggttagaaagacaatccaggaacgccagacgatcgttttctgtctggaaacccagcaaatcataatcacaaagctgttcaagcaaggtgtcatatgtcggcagcgcgttgaagatttccggtgtcgggaaaggaatatgcagaaagaaaccaatgcgattattcactccccgtttgcgtaattcatgcgcaaatggcaacaggtgataatcgtggatccagataatgtcatcgtcttgcaacagcggcagtaatttatctgccagcaacgcatttacgcgtagatagccgtcccaggcaggacgctgaaattgcaccagatcgagccgataatgaaaagcgggccagagaacggcattggagaattggttgtagtattcgtcaaggtcctgttcgctgaggttaaaagaggcccacgtaatgttaccttttttcaccttttttagcggctgatcctcattccctgtttcaccactccagccaaaccacagtccgcctgcggctttcagtgcccccagtatgccaacggcaaggccaccggcactggcggcgtgctcgtctggtggtgcaatccggttagatactacgactaaacgactcatagtcatcactcctgttattttctcttttttgttgtaatgcggtggttatcatttcaagccagctccagacatccggcacacccgccagtcgccatgatgcctgagttgcacctgtgccaatttttactgacattccgcccagtcggttaacgactgcgaagccagattcatcggttaaatcatcgcccagaaatacgggcgttcgcccgataaagggagcttcctgcataaaagctgcaattgcctcacctttactggtacctctcggtttgatctcgacaacacactttccctgctgtaacgccatttgtggccagatctgagtaatacgttgcgctaatgtcattaatgcgtcttcatgctgcggagcctgacgataatgcagcgcaaaagccatccctttcgcctccagctccgcgccgggatactgagcgatgactgtatgcagttgcacgctaatatcacgcgcaatcgcatccggcagatgaacgatatgtgttttaccattgatgtcacggcgctccgccccatgcacgcccgctaacgggaagcgataaggttttgccagtgcgtcaagctccaccattgagcgccctgatatcaatgccaatgcaccatcacttgcggttgccagtagctgtagtccttgcagaatattgtcaggcacgacgacctgatcgggatgcggtttgatttccgccagcgttccatcaagatcaaaaaaccaggcatatttcgcggatagttcaggggtttcggttaacggttctgtcacccggttctcctccttctcttttcttattgtgttgcgcagaacgcgctttacagacatgtaagtatagacagtgtgacgggggtcgccatttgcaacgaagaacagccaaccgttatggcggttggctatggtgggaaaaaacgctaaattgttgcagaaaaaagcatcagacagtgcgtttcgctttttgcttgtaacggtcgaagatcaccgctgccagcaggattaagccgcgaaccacgtactgcgcgaaaggagaaatattaagcaggttcatggcgttttccacggtgcctaaaattaagatacccgccaccacatatgagatttttccgatgccacctttcagagaaacgccacctaaaacgcaggcggagataacaatcagctcataaccaatcgacgtcattggctgcccactggtcatacgtgaagccagaataattccggctatcgctgataccaggcctgagagaacaaagataataattttggtgcgaacaaccggtacacccgccagacgcgcggcctcttcgttcccgccaatcgccagggtgttacgaccaaaggtggttttattcagcagcaaaccaaagataatcagacacgcgacggtgagccagattggcgcaggcagaccgaaccagttggcgtaaccaagggcaaagaagctttcatcttcgataccgaccgctttaccgtctgaaatgatgtacgccagacctcgaacaatctgcatcgttgccaatgtcgtgatcagagcatttattttcagtttggcgataacaaagccattgaccaggccacagagaacgcccagcaacaaccccgctgccacgccaatccacaggctttcagtcaggttaataaccaccgccgtggtgacacccgcacaggcaattacggaggcgacagaaaggtcaaagtcaccggaagcgaggcagaacaacatgccacaagccaccatccccgacatggaaattgccaggcccaaccctttcatattaatgaaggtggcaaaatttgggacaaaaatggcacaggcgataaagagcaccgcaaacaccaccagcatgccgtactgatcccagatacgcccgaagctgaatgacgacttaggtgcgccagaccccgatgtagaaacagaagacatcatactctccttactcaggcaacagcctggctgactttaggcatcgcaaggctcagtgcctgacgctcatctgcctgctcgtgtaacaattcaccggcgatttcaccttcccgcatcaccacaatccggtcggcaacgccgaggacttcaggtaagtcgctggaggcaaacagcaccgccacgccctgcgccgccagcgcataaattacgttatatatttcgtgcttagcgccaacatcaatgccgcgcgtaggttcatccagcaaaatgaccttcatctcttccgataaccagcggcccagaatggctttttgctgatttccgcctgagagattcatgatcagttgctccgcgcccggcgttttgatgttgagcgaacgaatgtggtgatcggcattgttttcttcccaaccgttgttgattacacaaccgccgagcacatgtttacgtctggcactgatgttgatattgtcgcgaacggagtgcacgggaataatgccttccgctttgcgatcttccgggcagagcatcatgcctgcggcaatggcgtggctcggtttacgaatatcgatcggctgttggtcgatataaacctgaccggcggtgatttgcgtcccgccaaacatgcctttcattaattcgctacgccccgcccctaccagaccaaacagcccaacaatttcaccactgcgaaccgccagacttattggcgtacgcacgcctggtgctttcacagcatcaagacgtaggcgctcctcgccataactacgcggttgccagccgtagatatcgccaatgtcgcgcccgaccatcgcctgcaccagcgcgtcgtggtcaacctgctgcatatcggtaaaggttttgacataacgtccatctttaaagacagtaatggcatcgctgagggcaaatatttcttccatacggtgagaaacgtataagattacccgcccctcttttcgcagttcacgaataacgcggaaaagattgtcgatttcacgggcagagagggagctggttggctcatcaaaggcgataattttggcgttacgcgccagcgctttggcgatttcaaccatctgccactgaccaatggagagatatttcagcggcgtgtccgggtcaatatccataccaagatgtttaagttgtaaacccgcctcataattcagcaatgagcgattcacaatgccgcctttatgcggcagctggccgagatagatgttttccgcgacggtcatttccggcacgagatgcagttcctggtaaataatcgccacgcccgcgttaagtgctgcggtcgtgtcggaaaaggacatttcctgcccattaatcactacagaacccgtggttggcgcatagttgccgctgaggatttttaagagagttgattttcctgcgccattttcacccatcaacgcatgaacctgaccggcatagcagtcaaaactaatatccgtcagcgccttaacgccgggaaacgttttaccgatgccgcgaaatgagagatacggggtagactgttgcataacgtctccgtgaatcactggtcgttcacaccccctctgcatcatgcagaggggaatttttccggcaaattacttaccgcctaaaccttttttctccagttcttctttaaagttgtcacgcgtgatcagtaccacgtcggtaacttcggtaaattttggcggttcaacgtcttttgctacccagttgtaaagcatttcgctggatttatagccatgtacgtccgggcttggcagcagggaaccgtagaagccggttgcctgtgctttagacagttcgctcaccgcatccacaccgttaatgccaatgccgatgatatcggccgctttaaagccctgaccttccgtcgcgcgtacgccgcccagcacggtgctgtcgttcataccgacgatcagccaatgtttaacttccggatgttgaaccagcattgagttggcagcgtcaaatgcccccgggatgtcgttagatttggtaggtacctgataaatttgtttttccgggaatccggccgctttcagcgcatccatagatcccgtagtacggcggcgggcggtatccagttcgttggcggtaatcgccatcaccgcgctttctttgacatcccagccacgtttctgcatctctttatacagttcctggccctgacgttcgccaattttagtcgccgccatcatcaccagcggaacggtatccattggcttacctttggcgttaacaaactggtcatccacggcaatgactttcatatcgtagccacgcgctttcgcgacgatggcagagccgagtttggggtccggagtacaaataacgaaaccttttgcgccactggcagccaggctgtcgatcgcgttcaatgttttttcgccatccggcacggcaatcttaataacctcaaaccctaaatccttcccggctttatcggcaaacttccattcggtctggaaccacggctcttccggttgcttcaccagaaaaccgagcttcaggttctccgccatagcggattgtgacataacggctgccagaccaatggctgccagggctttagtaaatttgtgcatggttctctccagctttagtgtcgttttgtgtagggcaaaaacgaatgacattcgttaaattaatcggaaaacaaagcattaccttttaactaaaagataagtgactgtgttgacatagttttagcgagaaattaattctccataggagagcaatatcacatcgcagaattacagtgagaacgtgcataaatttagcgggaaaagacataagggaaagccaatttgtcagacaaattgtcgaatgcacagcagattaatccataagattagcctggaaatccttgttgtctttggtacccatgcgggatgtcttctttttaaccagtcaataggccgcattacctggcgttgagtttttgaaatggtgtaataaccgcaactcaaagatgtggaaaatgcacgtcattcatttcgtcattaattatcactgtgctcattaattaacagaacacgtataatgagagccatctcgcaaaaatgaaaaaacgttttataaaatcatcacttcatcatgaattcaaattcattgattaatatcaacaagatacaaaaagcactatcattaaaattcattgcagttacattgatttcatcaatgaaatgtaaaaatatataaacttgatgatttaagcattttcttatacccgttcagacgttattcttatttcagatcatcgtcagaattgactccacgatcacatttcggaccggcagaaaggaattattctgcaaacagtaattatggtgttttgatttatcttgcacctctccacttctggatataaggatattaggtatggcaaccgctggaatgcttctcaaactcaactctcaaatgaaccgcgagttttacgcatccaatctctaccttcacctgagtaactggtgttctgaacagagtctgaacggcaccgccactttccttcgcgcccaggcacagagtaatgtgacccaaatgatgcgcatgtttaactttatgaagagtgtcggcgctacccccatcgttaaagccattgatgttcccggtgaaaaactgaactctctggaagaactgttccaaaaaacgatggaagaatacgagcaacgttctagtacgttggcacagttagccgatgaagcgaaagaactgaatgatgattcaaccgtcaatttcctgcgcgatctggaaaaagaacagcagcatgatggtctgttgctgcaaaccattcttgatgaagtgcgcagtgcgaaacttgcgggtatgtgccctgtgcagaccgaccaacatgttctgaatgtcgtgtcacaccagctgcattgatcatcatcggcgctaatgcattgcgccgatgaaggttttgagaaaccgctgcctcatctgtttgaagcagcggtttttttaatgggattcaccctgtggggtaaacttgagttcaataagcgcgatggctttttggattgcccgcatggtgaccgggtctgcggcggcgggatggttagtaaagtcgatattcttcagctgactggacattttttcacgaacttcaacgggcgcgattacatcgagaacatccagaatttgtttgataaccaactggcaagcaaccacatcagaaaccaattcctgatcggcattcagcggctgggacatcgtaaactcctgatagcattttgaaagccgttatagtagcgacttcacatcttcagcgatagtcacatccaccgtcatcaggacacaaaaaaacctgccggagcaggttttttgttatcggaacatattgcctggcggtacgtctttgaacgtcttgcaatagttattgaacatacttttcaggattttgcgcagtttcatcgcggcactccgaccatttgttatacaggtgttattgtctttgcgcttataatatgacaaccatcacaaaaatcaatctttatgtgatacaaatcacataaatacccctttaatgttataaaaatgataatcaaaaaacagcccccctatttctgacacctacagatggcaagaaatagcgcctgccaggcgtcttttccggccattgtcgcagcactgtaacgcgtaaaatagtgctttctcttactcttctggctggaccatgagacttctgattctgactctttcattaataacgctggcggggtgtacggttactcgccaagcccatgtgagcgaagttgacgcggcaacaggtattgtacggttagtttatgaccaggcttttttgcagcatgcccataccgatcgttatgtcagtcgcgggatcgccgatcgcgcatgccagcaggaaggctatacccacgcggtcccctttggtcagccagtaggcaactgtagcctttttgcgggttccttatgtttgaatacggaattcactttgtcatatcagtgccatcattccgccttccctgtctttctctaaatattttaatcagcgaggggatcttcgctgattaaagaaatagcggtaatgcgttttattcccattcgtatttttaataattgaagtttatattttaccttttgcaaataataaaataacaaattatagtgacgccacagcaacaaatataacctttgtggagcactatcatgctgaaaccagaaatgattgaaaaacttaatgagcagatgaacctggaactgtactcttcactgctttatcagcaaatgagcgcctggtgcagctatcataccttcgaaggtgctgccgcgttcctgcgccgtcacgcccaggaagagatgacgcatatgcagcgtctgtttgattacctgactgataccggcaatttaccgcgtattaataccgttgaatctccgtttgctgaatattcctcacttgatgaattattccaggaaacctataaacacgaacaattaatcacccagaaaattaacgaactggctcatgctgcaatgaccaatcaggactacccaacatttaatttcctgcaatggtatgtttctgagcagcatgaagaagagaaactgttcaaatcgattattgataaattaagcctggcaggcaaaagcggcgaaggtctgtattttatcgacaaagaactctctaccctcgacacacaaaactaatgctctccggcggcaggtttactgccgccgtttcaaatcagtgacggcaaatcttactctgatcggtcgaaaaaccgtctttcgaaggtataaatttgccttttgctgccagaaacgctaccagctctcccgctgtcatcccttctgccgagcaggtgtgaaaacgtgcctgttcaccaaaacgcgctttaatcgcagcttccagactggcatgcgtatattgctcgcctgattcaatcatcatatttaacacttcatgaccgtgaatagagtccatcgtccctcctcaaaaaaagcctagcgtagcgattgccgcttatgaagactttgcgccagcgcaggactgaatgctttttattgtacatttatatttacaccatatgtaacgtcggtttgacgaagcagccgttatgccttaacctgcgccgcagatatcactcataaagatcgtcaggacagaagaaagcgtgaaaaacagaaccctgggaagtgtttttatcgtggcgggaaccacaattggcgcaggcatgctggcaatgccgctggctgcggccggtgttggttttagcgttacgttaatcttgttgattgggctttgggcgttgatgtgctacacggcgctattactgctggaggtgtaccagcatgttccggcagataccggtctgggcacgctggcaaaacgctatctgggacgctacggtcaatggctgacgggcttcagtatgatgttcttaatgtatgctctgactgcggcatacatcagcggtgccggtgaattgttggcctccagcatcagcgactggacaggtatttctatgtcggcaaccgctggcgtgctgttgttcacttttgttgccggtggcgtggtttgtgtcggaacttcactggtcgatttatttaaccgttttctgttcagcgccaagattatttttctggtggtaatgctggtactactgctgccgcatattcacaaagtgaatcttttaaccctgccgttgcaacaggggctggctctgtctgcaatcccggtgatttttacgtcgtttggttttcacggtagcgtgccgagtattgtcagctatatggatggcaacattcgtaagctacgctgggtgtttataatcggtagtgcgatccccctggtggcatatattttctggcaggtggcgacgcttggcagcattgattcaacaacctttatgggattgctggctaatcatgctggattaaacgggctgttacaggcgttacgcgaaatggtggcctctccgcatgttgagctggcagtgcatttatttgctgatttagccctcgccacgtcatttctcggcgttgcgttaggcttatttgattatctggctgatttatttcagcgttcaaataccgttggtggacggttgcaaactggtgcaattacgtttctgccgccgttggcgtttgcactgttttatccacgaggatttgtgatggcgctgggttacgccggtgtggcgctggcggtactggcattgattatcccttcgctgttgacctggcaaagcagaaagcacaatcctcaggcgggttaccgggtcaaaggtggtcgtccggcgctggtggtggtgtttctctgtggtattgctgtgattggcgtgcaatttttgattgcggcagggttgttaccagaagtggggtgatcagatagcctcaaattccttattgggtgccagaattaacgctgacacccaatttggcctcttaatgcaggcagcactgcttaaatttcttaccactaccgcacgggcaaggatcgttacgccccggtttctcttctgctttgatcggttgctgaacagctttttcctgcggatgcgccatccagtacgcatgtagatcaagcgccgccagtcgaatggcatctacgctctcttcaaacgcttctggcgacatcttttctacccgctcgaagttttcctcagtaccgtgcagcgcaatcgcctccagcgctggttttaacgaatcgggcaacgttgaccagtcagaaagtgccacgccccgcatatagccaaagcaccactcctcaacaatcgtcagctcgctgccatcaacttctcgcaagccgaataacggctcaaactgctccgggaattcgttcagacgctctgcggtatcggccatatgttgaaaagccagattcataaagcgcgtcatctctttctctgacgcccagcgcggcacatagtcagccccaccccacacggcaaccagccactgttccggttcaatctcttgcggagaactcaacaccgccgtcaataaaccgtccagctccgccacatcaaggatggcgtggtcagtgttgtatttggtcagaatatcgtccagccattccaactcactttcgtttaacggtcccgttttcatacgcttttccttgtggatctcaactcgccagcacctatcttacatgccggtccgtatcagagatactttttgagtggctttgctggtgattaaaaattaaggagggtgtaacgacaagttgcaggcacaaaaaaaccacccgaaggtggtttcacgacactgcttattgctttgattttattcttatctttcccatggtacccggagcgggacttgaacccgcacagcgcgaacgccgagggattttaaatcccttgtgtctaccgattccaccatccgggctcgggaagaaagtggaggcgcgttccggagtcgaaccggactagacggatttgcaatccgctacataaccgctttgttaacgcgccaaattcttcaggcctttcagccagacatccgcttgacgccgatgtcttttaaactggagcgggaaacgagactcgaactcgcgaccccgaccttggcaaggtcgtgctctaccaactgagctattcccgcattcatcaagcaatcagttaatcacttgattttattatcgtctggcaatcagtgccgccgttcgatgcgttgcattctacttacctggcgcgatgagtcaacgatatttttcaccacttttgatcgtttgctgaaaattacgccgaaacgatcactgatcaagcaaatctgcacgcgcagcgctcaaatattgcaacattgaccacagagtcagtaccgcagccacaaagaaaagtgcaataccggcgtactcaacccaaatgttcggacgccacagcagccatgccaacgccaccatctgggcagtggttttcactttcccaatccaggagacggccacgctactgcgtttacccaactccgccatccattcgcgtagcgcagaaataataatttcacgggcgatcatcgttgccgccggtaatgtcacccaccagctgtgataatgctcggttaccagcaccatggcgatagccacgagaactttatctgccacagggtcaaggaaagcaccaaaccgggtactctggttccagcggcgtgccagaaaaccatcgaaccagtcagtcaccgccgcgacgcagaaaatgagcgcggcggcaaacggcgaccaggtgacaggcagataaaagaccaatacaaagaatgggataaggatgacacggaacagtgtaagcaacgtagggatattaaattgcataatgacgggtaactatctgttgtcagtaagattacccctatgttgctacagagacatcaatgtttcaacgaccagaagatcttttctgccagaccttgcgaaatacccggcacttttgcaatttcctcgacgctggcgttacgtaaaccttgcaaaccgcccatatatttcaacaacatttgccgacgttttggcccgacgccttcaatggtttccagggaactggtatttttgaccttcgcccgttttttacggtgcccgccaatcgcgtgatcatgtgattcatcgcgaatatgctggataacatgcagcgcgggtgaatctggcggcaaactaaatccctcaccttccggctcaaagaacagcgtttccagtccagccttacgatctgctcctttggcaacgccaagtagcagcggatgatttttatcccatgagacatccagttcggcgaagacatttttcgcctgcgcaagctggcctttgccgccgtcgataaggatcacatccgggatcttactgtcgtcaatggctttaccataacgccgacgcagcacctgattcatcgccgcataatcatcgcccggcgtgatgcctgtaatgttatagcgccgatactccgcacgcagcgggccgttagcatcaaacaccacacaggaagcgacggtttgttcgcccatggtatggctgatgtcaaagcactccatccgcttcacttccggcaatttcaacacgctggcaagcgcggtcagtcgctggtgaacggtagattgctgcgaaagtttgctggttaaggccgtcgccgcattggtgcgcgcgagtttcagataacgcgccctatcgccgcgaggtttggtttgaacattaatcttgcgtcccgccagttctgaaagggaatcggcgagcagcgttttatcgctaagattaaaatcgagcaggatctcacccggtaaggtgcgcatctggctgccttgtaaatagaactggcctacgaaggtttctaccacctcgctcagttccgtaccgccaggcactttcgggaaatagctgcggctgccgagcactttgccctgacgaatgaacaatacgtggacacaagccatgcccgcatcgaacgccacaccaataacgtcgaggtcgtcgccggtattggaaacgaattgtttttcggtgacgcgtcgcaccgcctgaatttggtcgcgaatacgtgcagcttcttcaaactccagattctggctggcagtttccatacgactaatgagttgcgtaagcacctgatcatctttgccagacaaaaacaggcgcacatactcgacctgctgagcgtattcttcttcactcaccagtccttcaacgcacggtcccagacagcgccctatctggtattgcagacacggacgcgagcgattgcgataaacactattttcgcactggcgaatggggaaaatcttttgcagtagcgccagtgtttcacgtacggcatagccattcgggaacgggccgaaatattcacctttggcatgcttcgcaccacgatgcatcgccagacgcgggtgggtatcaccactcaggaagataaaaggatatgatttatcatcgcgtagcaaaacgttgtaacgcggctgatagagtttgatgtagttgtgttccagcaacagcgcttcggtttctgtgtgagtaaccgttacatcaatttgctggatctgggcgaccagcgcttcggttttgcgcgaagcgaggttgctacggaaatagctggaaagccgttttttcaggtctttcgctttgccgacatagataaccgtaccaccagcatcgtacatgcgataaacgcctggctggctggttacggtttttaaaaacgcttttgcgtcaaactgatcactcactgacttgataatgtctccgcattacacagaccatggcgaattgccaggtgagtcagctcaacatcgccatgaatgtttagtttactgaacatacgatagcggtagctgttcaccgttttcggactgagattgagctgttctgagatctcattgaccttctggcccttggtgatcatcagcataatctgcaattcacgttcagacaaactggcaaatgggctttctgttttttctggttcgatctggcttaacgccatttgttgagcgatgtcagaagcaatgtaacgctgccctgaatagacagaacgaatcgcactcacgacttcctgcggagccgcgcctttgctgaggtagcccgcagcaccggcctgcatgactttcgctggtaaagggttttctgtatggacggtaagcatgatgattttgacatcagctgtggaacgcgcgattttacgcgtcgcctcaagaccgccaatgcccggcatactcatgtccattagcaccacgtcaacggcatttgtccggcaccacttaacggcgtcttcaccgcacgatgcctcaccgacgacttttataccctttatatcttccagaatgcgtcgtatccctgcgcgcaccagttcgtggtcatcaacaagtagaacgttgatcaaaggaatatctccagaaatagggataacgctactgatagttagtcattcgtatattagcggtttttattgcaactttgaaacgttaaaaatggtgggtattcgatttttctctcgtttttgtcaattcgattgtccacagttatggtcacgcccgtcaccaacggcttaccggatcgtttcacagtaagccctacgatgaaatgtgacaaaaattgactttattcagcaaaaatgaaaatcagcccgctgaatatgtaacattaattaacccgaacaatacgggcaaaaaacattcatgataaaaatatttattggtcattatattaacgtattttatagcactgccgatatcacgctcaaaaaacaaccactgctatttttagcaaagcttatggtatactccgccgccttaacatttttcaccgcaaattttcattgcaacatgacgaggaaaataaatgagtacgcctgatttttctactgccgagaataatcaagaactggcaaatgaagtctcctgcctgaaagcgatgctgacgctgatgctgcaggcgatgggacaagctgacgcgggccgcgtgatgttaaagatggaaaaacagcttgcgctgatcgaagacgaaacccaggctgcagtattttccaaaacggttaagcaaattaaacaagcctaccgtcagtaatataaaaccggctgatagcgtgcctttcagccggtttttgcatctggcacgcaggacagaaaagagatcaaattaagccagtagcggccgcgtaacaggcaacctgggtcttatttggtgcattaatttttttctgcatgtttttctggtggaaattgaccgtattctcagagattgacaaaatcatcgctatctctgctgatgttttcccttccgccgtccacctcagaatttctttttcgcgcttgctgaaattcatctctggcgtcatcactatttcatcatttaaacgcatcagagccatcagactttcgcgcaccagtaactgcatttttaattgcagttcatcactaagaatgggtatttcgcgcgcgctgcaacgggaaaaggacaaaaagcccagcgcccggtttggcagcattaaatactgagtgacaccgcggcgtaaaccatgtgcgcgcgcggcttcccataacggctgtgcttcgctgaataagtcatcattccacattaaatggccctgactaaagttttcagggttcagcaccggatcaattgcgagaaagttttttgcctgataataactaacccacgcctcagggtaattggtgtaaaaagccactttaggtcgagtgaatggtaccgggtggcggacacataacgaatagtaatcgtactccagctgctgagcctgaagctcaatttcatggtagacctcttctgcggtctccatcctctgaaaacgcaacagcatcgtgcgacgccagctgaaaaaatccttatcctgcatagtaaaccgcaacgcccctgagagtgagtatcatttataatgataattcaaactatcacataaataagatttatatataatttatattattcaggcaatgaattacttttgcaagccatcgcattctcttatgttattaatgagttatgctgatttgttaagcagttttatcaggcttgaaatggcgtccagccccgacaggtgaatcgtcggggctgattttttcttattattgcagcagaaacttctcgaggaactggcgggtgcgaggctgctcggggtcggcaaataacgcttttgcggccccctgctcgactatccgcccctggtccataaagatcgcccggtccgcaacatcccgggcaaagctcatttcgtgcgtcacaatcaccatcgtgcgcttttcctgcgccagctgacggatggtgttcaggacttcacccaccagctctggatccagcgctgacgttggctcgtcaaacaaaatcacctcaggacgcattgccagcgcacgcgcaatcgcaacacgctgctgttgaccgccagacaaacgacgtggatagctggtttctttacctgccagcccaacttttgccagcagctcgcgagcgcgcgccgtggcctcttctttcggttcacctttgacgatcaccggcccttcaataatgttctccagcaccgtacgatgcggaaacaaattaaagttctggaagacaaacccgacgtgctgacgcaactggcgaatcagagatttttgctgacttaatgaacgtgcagtatcaatagtgatatcgccaacggtgatcgttcccgcttcgggttgttccagcagatttatgctgcgtagcaacgtggttttgccggaaccactcggaccgataattgccaccacttcgccaggctttacctcaaggtcgataccgtgcagcaccgtctgaccgtggaattttttcaccaggttcttaacttcaatggcactcattttggttctctctcctggcgattaagttgattctcaaaatggttctgcaacgtcgataacacagtcgccatgatccagtagatgagcgaagccgccagatacatggtgaacacctccagcgtacgcgaggtaatcaactgcgcctgacggaacagctccggcacctggattgtcgcggccagcgacgtatcttttaccaggctaataaagctgttcgacagcggcggcaacgccacacgcgccgcctgtggcaaaatcgcgcgacgcatggtctgccacggcgtcataccaatactggctgccgcttcccactgacctttatcaatagaagaaatggcggcgcgcagcgtttcggcagcataggcggcagtgttcaacgacagaccaatcattgctgacggaatgggatctaattcgataccaaactgcggcaggccgtaatagatcataaacagttgtgcgatgagcggcgtaccacgaaaaatagagatataaaaacgcgccagccagcgcacgggccagattggcgacagacgcatcagcgcgagaataaacccgagcagtaagccaaaaaacatgccgccgatactgagttgcagcgtatacccagcccctttcagcaggaacggcaaggaatcaataaccagttgtatactttcttgcatgagcgtttccggagctaaacgtggggatgataggcgaacagcgcaggcgcaccgccggtatgaataaacagaatcggcccttcatctttgaagcgtttctgactgataccgtcaatcagccccgccatcgcttttccggtatacacaggatcaagcagaatgccttccagccgcgccagcaatttcactgcttccatgccttcgtcgttcggcacgccgtagccaggtgcaaaatagtcatcccagagtaaaatttccgctgatgcggtcagctccagttctttcgcaatcgcctgttgtaggttaaccactttcggcaattgatcggcaacggaacgcgacacggtcacgccaatcagttcgctttcaggcatcaggtgttccagcccaacagccagtccggcgtgagttccggcactgcccgatgcgactaccaccgatgaaatattaaccgccccttcacactgttgcgcgatttccagcgcactctccacataacctagcgcgccaagagcattagaaccgccaaccggaatgacatacgggcgaaagccttgtgcttcgactcgcgtcgccagctcttccagttgggcattgggatcggtcagtgcgtcgcacatttcaatctgggtattgaacagatccagcaacaagcgattgccgttggttaaatagttttctgcggttgtgccaataggattttccagcagcgccacgcagtgcagaccgagtttggcagcgactgcggcagtctgccgcacatggttagactggatcgccccggcagtaatcagcgtatcggcaccttcacgcagagcatctgccgcgagaaattccagcttacgtaatttattgccgcccattgccatgggggtgacgtcatcccgtttgatgaaaatttcccgtcctagataatcagaaaagcgcggcagatattcgagcggcgttggcgcgccgataaactccagccgtggaaaacgggttaaattatgcagtggcataacagcctccgatgtgtgttgttgtgattttcttattatgcacgctgaaaacgcgtaaataaaaaaggcgctagtgaaagcgcccttttttgtcattatgctgattatttggtcacatcagcaccaaaccatttttcggaaagggcttgcagagtgccatctttttgcatttccgcaattgcatcattcactgctttcagcaggtcctcatttcctttacgcagcgccacgccagactcctgacgggagaatgcttcaccggttactgccagcgtatcgttggttttcttcaccagatccagcgccgccagacgatcaacgaggatcgcatcgatacgccctacgcgcagatcctgatatttggtcgggtcatcatcataggtacgcacatcgacgccctgaacattctgccgcagccactcttcatagttggtgcccagaccgacccccacttttttgcctttcagatcatcggctgttttaatggtgccttcgttaccttttttcaccagcgcctgaataccagaaatggtgtacggggttgagaaatcgtattttttcttgcgctcatcagaaatggtgacctgattaatcaccacatcaatacgtttagagtccagcgacgccagcataccgtcccatttggtcggttttagtgacgcctcaacgccaagatgttttgccagctgttgggcaaattccacttcaaaaccggttaatttgccgtcatctccctgaaaactgaacggcggataagttccttccagccctaccagcagcgtgccgcgctctttaactttattaagcagaccttcatctgcaaaacttttaacgctcatgcccgcaaccagcgccacggccatcacacccatcaatgcctgacgtcccagatgtgctaatttcatattcaccccgaatgttgttatgtctgtttgcagtgtagagccattgtttgtaaacacaaaaacaactccgctacatcttattcttatttaatatatatcagaagaaggcaggctggaggatttctgcacaagtctggtacaggtttggcgctgatagtgttgatacttccgtaacgcgatgcggtaattgttggtgctggtggtgggcagccacggggcgaggatttcatcaaggaaaccgtcctgcagctgatcgagggaaatattttgctcgtgtagatgattccccaaacggcgcaaacgaacgacatattcacgcaccgtacctgggctcatttcagtttgctcaaaaagaaattgcttaaagccgataatatcgaaaaaatcactctgcgttttgcaatgtaaatcaccgcaaaatcggcacaatgccgcccatgatttttgttccgtttgccagccattttcatcaagcagcgtgtccaggcgggaaatctcgattttattcactattttgccgtcgcgaactaaggtaatgcgatcgagtaatttacggcaatgcgcgcaatgggtctggctgtgtttaaagtctttaagatagcggcttaatggccgtcttttcaggtgctgcaccatcattaagaactcctggtagtcaaagttaaagtgcggcatttactgacgttataacttacccagtttagtgcgtaaccgtttaatagcctggctgtgtaactgactgacccgcgattccccgacctccagcaccgcgccaatctctttgagattcagctcttcctggtaatagagggttaataccagtttttcgcgctccggcaacgtttcgatggcttccatcacccgctggcgcagattactgtccagtagttgttgtagcgggttttctcgctgatgatcatcagtaaccagttcgatgctatcgccgtgctcttcgcgccactcatcgtaggagaagagctggctgttattggtgtcgagcaacatttggcgataatcggcaatatcgatccctaaacgttccgctacctcagtttccgtggcgttgcggccaagttcctgctccagttgccctattgcctgtgccacttcacgcgcgttgcgtcgcacgctgcgcggcacccagtcacggctgcgaagttcatccagcatagcgccacggatacgctgcactgcgtaagttgtaaatgccgttccttgtagggcgtcatagcgttcgacggcattaagtaacccaatgccgcccgcctgtagcagatcgtcaagttccacgctcgcgggcagtcgaacctgcaggcgcaatgcttcgtgacgcaccagcgggacataacgctgccacagcgagtgtttatccattacaccttcagcggtatagagtgaattcacgataaacagccctgcgttatatgagttatcggcatgattatccgtttctgcagggtttttaatcggacgattagtgggtgaaatgaggggttatttgggggttacaggtaaattccaggcagaaaaaaaccccgccggtggcggggaagcacgttgctgacaaattgcgctttatgttgccggatgcggcgtaaacgccttatccggcctacaaaaatgtgcaaattcaataaattgcaattcaacttgtaggcctgataagcgcagcgcatcaggcaatttggcgttgccgtcagtctcagttaatcaggttacaacgattaaccctgcagcagagacagaacctgctgcggtacctggttagcttttgccaacacggagttaccggcctgctggatgatctgcgctttcgacatattggacacttcggtcgcatagtcggcgtcctgaatacgggactgcgcttcagacaggttggtagtggtgttgttcaggttggtaaccgcggaatccagacggttttgcaccgcaccgagggaagaacggaatttgtctacagatgcgatagcatcgtccagcgctttcagcggatccgtggttttaccatttgcaacagcagtcagagcctcaccaccagcagtcaaacctgtttgcagattaccgccatttaaatcggcagaatcgtatgttttaccatcaatatcgaccacttctgttttgccatcatctccgcccagtttgaccgcggttggagaactggcggcaccggaagagtcagtataggtaatagttttaacagaaacagcaccagtagtttcattcacatccgcagcgtaaagattgccatttgtatctttaagcgcatatgtatcggtatcattacccttggaatcctgcagttttactaagctaacagcaccaaggttggcagttgcggaacctgcagtattatcaatctgaacaggtgtaccgcctgaagtgatagttgtagctttagtagtatttgcatcagttacagttgcatttgccgttgctccagtcgccattgtcactgtaccatcattagcaactgttactgcgtaatacttcccatcgttatcaccaccggtgattttcgcatagtaatcattaccattatcagtataaacaccctcaattgaagctgggttagttccgccagtatcagtggctgcttccgtagaaagggtaattccagtaagtttaatattgtttgtggtggtagcaccaaaagcagttactggagcactagtggtaactgtatcgttatttttaacgctaaaaccatcaaggccaagagttttagcatcaatctgcttcagatcgatagtgatagtctggttatcatttgcgccaacctggattttcatggagccattttttgccagcacgttcacgccgttgaactgggtctgaccagatacgcggtcaatttcatccagacgggatttaatttcgtcctggatagaagacagatcagactcagagttagtaccggtagtggcctgtaccgtcagttcacgcacacgctgtaagttgttgttgatttcggacagcgcgccttcggtggtctgcgcaacggagataccgtcgttggcgttacgggccgcctgagtcaggcctttaatgttagaggtgaaacggttagcaatcgcctgacccgctgcgtcatccttcgcgctgttaatacgcaagccagaagacagacgctcgatagaactcgacagcgcagactggttcttgttgatattattttgagtgatcagcgagaggctgttggtattaatgacttgtgccatgattcgttatcctatattgcaagtcgttgattacgtattgggtttccacccgtcggctcaatcgccgtcaaccctgttatcgtctgtcgtaaaacaacctttagaatttttttcaaaaacagccattttttgttagtcgccgaaatactcttttctctgccccttattcccgctattaaaaaaaacaattaaacgtaaactttgcgcaattcagaccgataaccccggtattcgttttacgtgtcgaaagataaaaggaaatcgcatggcaagtatttcatcgctgggagtcgggtcaggtctggatttaagttccatccttgatagcctcaccgccgcgcaaaaagcgacgctaacccccatttcaaatcagcaatcgtcgtttaccgctaaacttagcgcctacggtacgctgaaaagcgcgctgacgactttccagaccgccaatactgcattgtctaaagccgatcttttttccgccaccagcaccaccagcagcaccaccgcgttcagtgccaccactgcgggtaacgccatcgccgggaaatacaccatcagcgtcacccatctggcgcaggcgcaaaccctgaccacgcgcaccaccagagacgatacgaaaacggcgatcgccaccagcgacagtaaactcaccattcaacaaggcggcgacaaagatccgattaccattgatatcagcgcggctaactcatcgttaagcgggatccgtgatgccatcaacaacgcaaaagcaggcgtaagcgcaagcatcattaacgtgggtaacggtgaatatcgtctgtcagtcacatcaaatgacaccggccttgataatgcgatgacactctcggtcagcggtgatgatgcgctacaaagttttatgggctatgacgccagtgccagcagcaacggtatggaggtctcggttgccgcccagaatgcgcagctgacagtcaacaacgtcgccatcgagaacagcagcaacaccatcagcgacgcgctggaaaacatcaccctgaacctgaacgatgtcaccacgggcaaccagacgctaaccatcactcaggacacctccaaagcgcaaacggcgattaaagactgggtgaatgcctacaactcgctaatagataccttcagcagcctgaccaaatacaccgccgtagatgcgggagctgatagccagagttctagcaatggtgcactgctcggcgactccacgctgcggacgattcagacgcagttgaaatcgatgctgagtaataccgtcagttcttccagctataaaacgttggcgcagattggtatcacgaccgatcccagcgatggcaaactggaactggatgccgacaaactcaccgctgcactgaaaaaagatgccagcggcgtaggtgcattgattgttggcgatggtaaaaaaaccggcatcacgaccaccatcggcagcaacctgaccagttggctttcgacaacgggcattattaaagccgctaccgatggcgttagtaagaccctgaataaattaactaaagactacaacgccgccagcgatcgcattgatgcgcaggtcgctcgctacaaagaacaatttacccaactggacgttttaatgacctcgttaaacagcaccagcagctacttaacgcagcagttcgaaaacaacagtaattccaagtaagcaatattcatcgggagacaggtcatgtacgcggcaaaaggcacccaggcctatgcacaaattggcgtcgaaagcgccgtaatgagcgccagccagcagcagctggtcaccatgctatttgatggagtgctgagcgcactggttagagcgagcctgtttatgcaggacaacaatcagcaaggcaaaggcgtctctttgtcaaaagcgatcaacatcattgagaacggactgcgggtgagtcttgatgaagagagcaaagacgaactaacccaaaacttgattgctctttatagctatatggtcaggcgcttgctgcaagccaatttacgcaacgatgtctccgcagtcgaagaagtggaagcattaatgcgcaatattgccgatgcctggaaagagtcgttactctccccttctttgattcaggacccagtctgatgaaccatgcaccgcatttatatttcgcctggcaacaactcgtcgaaaaaagccagctcatgttacgcctggcaacggaagaacaatgggacgaactcatcgccagcgaaatggcgtatgtgaatgcggtgcaggagattgcacatttgactgaagaggttgacccgtccaccacgatgcaggagcagctccgcccgatgctgcgcctgattctcgacaacgaaagcaaggtaaagcagttattacagattcggatggatgaactggcgaaactggtcggtcagtcatcggtgcaaaaatcggtgttaagtgcctatggcgatcagggcggctttgtgctggctccgcaggataacctcttttgaatctgaatgagtcgatggctcgcgaataatccgattacggctacgcttctaatgttccccttgaatggagtcgaagaatgcgtaatcccacgctgttacaatgttttcactggtattacccggaaggcggtaagctctggcctgaactggccgagcgcgccgacggttttaatgatattggtatcaatatggtctggttgccgcccgcctataaaggcgcatcgggcgggtattcggtcggctacgactcctatgatttatttgatttaggcgagtttgatcagaaaggcagcatccctactaaatatggcgataaagcacaactgctggccgccattgatgctctgaaacgtaatgacattgcggtgctgttggatgtggtagtcaaccacaaaatgggcgcggatgaaaaagaagctattcgcgtgcagcgtgtaaatgctgatgaccgtacgcaaattgacgaagaaatcattgagtgtgaaggctggacgcgttacaccttccccgcccgtgccgggcaatactcgcagtttatctgggatttcaaatgttttagcggtatcgaccatatcgaaaaccctgacgaagatggcatttttaaaattgttaacgactacaccggcgaaggctggaacgatcaggttgatgatgaattaggtaatttcgattatctgatgggcgagaatatcgattttcgcaatcatgccgtgacggaagagattaaatactgggcgcgctgggtgatggaacaaacgcaatgcgacggttttcgtcttgatgcggtcaaacatattccagcctggttttataaagagtggatcgaacacgtacaggaagttgcgccaaagccgctgtttattgtggcggagtactggtcgcatgaagttgataagctgcaaacgtatattgatcaggtggaaggcaaaaccatgctgtttgatgcgccgctgcagatgaaattccatgaagcatcgcgcatggggcgcgactacgacatgacgcagattttcacgggtacattagtggaagccgatcctttccacgccgtgacgctcgttgccaatcacgacacccaaccgttgcaagccctcgaagcgccggtcgaaccgtggtttaaaccgctggcgtatgccttaattttgttgcgggaaaatggcgttccttcggtattctatccggacctctacggtgcgcattacgaagatgtcggtggtgacgggcaaacctatccgatagatatgccaataatcgaacagcttgatgagttaattctcgcccgtcagcgtttcgcccacggtgtacagacgttatttttcgaccatccgaactgcattgcctttagccgcagtggcaccgacgaatttcccggctgcgtggtggtcatgtcgaacggggatgatggcgaaaaaaccattcatctgggagagaattacggcaataaaacctggcgtgattttctggggaaccggcaagagagagtagtgaccgacgaaaacggcgaagcaaccttcttttgcaacggcggcagcgtcagcgtgtgggttatcgaagaggtgatttaaattcatccccggcggcaagccggggagatttcattacggcagtggcgtcggtaacggcgctttatccagcgcggcggcacactctgctgtcgggcgatccacacgctccatcgtcataccatcgtactcaatggtgttaccgtcacgctcaacctcgtacagctcacgttttacggtaacgttagtgagatcatcagacatcaatgtcaacttacccggcacggcaatcacccgctgccactgacggcaatccagggtatcgccctctttagtgacaatcaggctgcctatcgcttccgggctgaccagcgcacgttgcggccctttggtctgccagtagcccgccagccagtccggcgcgggggttttcacgacattgttatagttttcgacttcggcacagcccgccagcaacaagagcgcgcctgcaattgcgagttttttcatcattcgtcctgcatgagaagaaaagaggattgtggcattaaagccctgatgtcgccagcctttcaaggttcagagagaaatttgatctaactattatttttgtgaattattaccccgaaaataaatttgcatggtgtatgattcgcgactcttgtttcaaaccttctgagttcagaggctacattcatgtcatggcagcaattcaaacacgcctggttgattaaattctgggcccccatccctgcggtcatcgcggcgggtattctctctacttactattttggcattactggcaccttttgggctgtcacgggtgaatttacccgttggggcggccagctcctgcaactgttcggcgtccatgctgaagagtggggttactttaaaattatccatctggaaggatcgccattaacccgcatcgacgggatgatgatcctcggtatgtttggcggctgctttgccgcagcgctgtgggccaacaatgtcaaactgcgaatgccgcgcagccgtatccgcattatgcaggccatcattggcggcattatcgccggttttggcgcgcgtctggcaatgggctgtaacctggcggcgttctttaccggtattcctcagttctcgctgcatgcctggttctttgccatcgccactgccattggttcatggtttggcgcgcgctttaccctgctgcccatcttccgtattcccgtgaaaatgcagaaagtttctgccgcctcaccgctgacgcaaaaaccggatcaggcgcggcgtcgttttcgtctcgggatgctggtctttttcggcatgctgggctgggcgctgctcacagcgatgaaccaacccaaactggggctggcaatgctgtttggcgtcggctttggtttactgattgaacgtgcgcaaatctgctttacttcagcgttccgcgatatgtggatcaccggacgtacccatatggcgaaagcaatcattatcggtatggcggtgagtgccatcgggatcttcagttacgtacagttaggcgttgaacccaaaatcatgtgggcgggaccaaacgcggtaattggtggtttactgtttggttttggcatcgtgctggctggcggctgcgaaaccggctggatgtaccgcgcggtagaaggccaggtgcactactggtgggtcggtctgggcaatgtgatcggctcaacgattctggcgtattactgggatgatttcgctccggcgctggccaccgactgggacaaaatcaacctgctgaaaacctttggtccgatgggtggcctgctggtgacatatttgctgttgtttgctgcgctgatgttgattatcggctgggaaaaacgcttcttccgccgtgcggcaccgcagactgctaaggagatcgcatgaaaaatatcgttcctgattaccgccttgatatggtgggtgaaccctgcccttatccggcagtcgcaacccttgaggcgatgccgcagttaaaaaaaggggaaatcctggaagtggtgagcgactgtccgcagtcgatcaataatattccactggatgcgcgtaatcacggctatacggtgctggatattcagcaagacgggccgaccattcgttatttaattcagaagtaatccctcattcccgctgtgacccacagcgggaacatcgttacctttgtatcacatagattttacccgcccccactcctattcttttcagtatgatctcaggaggtttctatgtgtggacgctttgcccaatcccaaacgcgtgaagattaccttgcgcttctcgcggaagatattgaacgcgatattccctatgatcccgaacccattggcagatacaacgtcgcgccgggaaccaaagtcctactgctcagtgaacgtgatgaacaccttcatctggatccggttttctggggatatgctcccggatggtgggataaaccgccgctgattaacgcccgcgtagaaactgcggcaaccagtcgtatgtttaaaccgctctggcaacatggtcgggcaatctgttttgccgatggctggtttgagtggaaaaaagaaggcgacaaaaaacagcctttttttatctatcgtgctgatggacaacctatttttatggccgcgataggtagcacaccatttgagcgtggtgacgaagccgaaggatttttgatcgtcactgctgcggcagatcaaggtctggtagatattcatgaccgccgcccactggtactgtcgccagaagctgcgcgggaatggatgcggcaagagattagcggtaaagaagcctcagaaatcgcggccagtggctgtgttccagcaaaccagttctcctggcacccggtatcgcgcgcggtgggtaatgttaaaaaccagggcgcggagttaattcaacctgtttgataagcctggagattattgatcaacaatactgcgtcataagaaatctctattagacaaagatttcattacctgttggcatattgcaaaaataacaccaatacggaatcgtcatgttcacgattaaaacagatgatctcacccatccagcagtgcaagcattagtggcttaccatatttccggcatgctgcagcagtctccccccgaaagcagtcatgctttagatgtgcaaaaattacgtaacccgacagtgacattctggtcagtatgggaaggcgaacaactcgcaggaattggtgcgctgaagttgctggatgataaacacggcgagctgaaatcaatgcgtaccgcgccaaattatttacgtcgtggtgtcgccagtctgattttacgccacattttgcaggtcgcccaggacagatgccttcatcgcctgagcttagaaacgggtacacaggctggatttacggcctgccatcaactttatttgaagcatggtttcgctgattgcgaaccgtttgctgattatcgacttgatccacacagtcgatttttatcattgacgctatgcgaaaataatgaattgccatgagccagacgcagcacattcttgcattcgacgtgctgcgcctttatttatcaccagcaggaaacgccttgtccatagacgccccttccacatgcgccacaagaaacctctattccagtgacacaattgcgcctaattaattacatttaatatttaattatgagttcctcaccatctattacatactttttaaccatatcggaatatttatcataatcagcgggattcgtaacaatatattttcgctgcgatctttcatagcaaatccctgtcaaagtccatgatataaaaatgtctcttcaaaagaattacattctttaaaaagtaattctttattgctatatatcgcagagacaacctcaatatcacactccatacgtgctttctccagatgatttgggaagtattgaatttcttttatcttattatcgccacaattaaacagcttagtagtctcaggcattgctggtatttaccatattttattgcgataaatagaaattgtcatagcctttgacggagatgagtcaacacgcgatatcagattattatctacggagacctgggtaattccatcggatacttttggaaataccatataattattgaaatcgagctctaattctttgcagaatttgggaatttgtattgtggcaaggccattatgacgaagataaagcacctcaatccaggatggaagaggtggcaaagaccccaagtgaagatctgttaagtcaagtttactattgtggagttcaacacatttaaacaatctcaccaatgctatatccacattttttttgaagtcattcgatgcgccttcttttactgaattagcccagtcgctgaaacctttgcaaagtctggaatctgtaattttcgtaaagttgtctagaaactctgcaatattagtcgatataaactctaatttatgccgaatgggtgggttaccagttccctgattttttctatcatgataaaacctatcttattataaatcgagaaatcttgaaaccagagactataatcaccccattcgaaatattctgagtgcaataacttaaattctgacagcatattaaataatttgctgtcttcactaattggtgtaaacttaccatttccaagacaactgactaactcacttgataattcatttatgattgcatcatcagatactaactcatgttgttttatcgtagattcagtattagatgtgactttatttaattgaaccggctgagtttttaacgaaagatcatttaatggaaacatttacactcctgtttaataaattatattgcccagggcgcattctaaaacacaataaaattaccactatcaaaaatcgctcatatccatcgcccggaatatgaataaaaacatcaacaaagattaaattatccagaggttactgttgcgtctgtggtcgtaacaacatccgacgtggtgatgtgtcaaatgagacgctctgatgttcaggggggttatcgcgtatacggatcgtggatggcagaaaacgttcaggatcaggtatccattttaaaccagaaattgagtgagtttgccccatccatgccccacgcggtgagatcggatgtaattaacaacaggttacaaaacctacacctgcatgctcatcacttcctgatacgccgccaccagcttattacgcacctgaatccccatttgcatagaaactgaggctttttgcatatcggtcatcacatcgtttaacgccacgccgggttcaccgagagtgaatttttctgcctgcgtgcgggcagctgtttgtgtatcactaatgcgatcgagcgcggcgtgcagctgcccggcaaaactaatggtcggttgcggcagtgattcctgcgcacgcgcactcatcgccgtagcctgtaactggctgataaccccttcaatcccctgtatcgctgacattctcgtctcccggataatttctggtagcaaagcctaccagtaagtcaataagacaaaggcgctaaatagcaacaaaaaaacgggtttattggcggatagaaaaaaacgaaagcacaaataatgggagcgtcaatttttcgagtttgctgacccgggagtgagtcttgttccactttgccaataacgccgtccataatcagccacgaggtgcgcgatgaatgcgactgcagcccagacaaaatctcttgagtggcttaatcgcctgcgtgcgaatccgaaaattccattgattgttgccggttccgcggcagtggcggtcatggtcgcactgatcctgtgggcgaaagcccccgactaccgcacattattcagcaatctttccgatcaggatggtggcgcaattgtcagccaactgacgcaaatgaatattccttaccgcttcagcgaagccagcggcgctattgaagttccggcagataaagttcacgaactgcgtctgcgcctggcacaacaaggtttgccaaaaggcggcgcggtcggtttcgaactgcttgatcaggaaaagtttggtatcagccagttcagcgaacaggtgaattatcagcgggcgctggaaggcgagctttctcgtaccatcgaaactatcggcccggtaaaaggggcgcgcgtacatctggcaatgccgaaaccgtctttattcgtccgtgaacaaaaatccccttctgcatcggtgacggtaaatctgttacccggccgcgcactcgatgaagggcaaattagcgccattgtgcatctggtttccagcgccgttgctggtctgccgccgggaaacgtcacgctggtggatcagggcggacatctgttaacccagtccaataccagcgggcgcgatcttaatgacgctcagttgaaatatgccagcgatgtcgaaggccgtattcagcggcgtattgaagcgatcctgtcgcctattgttggtaacggtaatattcacgcccaggttacggcgcagctggacttcgccagtaaagaacaaacggaagaacagtatcgccctaacggtgatgaatctcatgcggcgcttcgttcacgccagcttaatgagagcgagcaaagcggttccggttatccgggcggcgtaccgggggcgttgtcgaatcaaccggcacctgcgaataacgcgccaatcagcacgcctccggcaaatcaaaataaccgccagcagcaggcgagcaccaccagcaatagtgggccgcgtagcacacagcggaatgaaaccagtaactacgaagtcgatcgcaccattcgtcataccaaaatgaacgtgggcgatgtgcaacgtctgtcagtcgcggtcgtggtgaattacaaaaccttgccagatggcaaaccgttgcctctcagcaacgaacagatgaagcaaattgaagatctgacccgcgaggcgatgggcttttctgaaaaacgcggtgactcgctcaatgtcgttaactcgccgttcaatagcagtgacgaaagcggcggagaactgccattctggcaacagcaagcgtttatcgatcagttacttgctgccggtcgctggttgctggtactgctggtggcgtggctgctgtggcggaaagcggtacgtccgcagctaacacgtcgcgctgaggcgatgaaagctgtacagcaacaggcgcaggcccgcgaggaagtggaagatgcggtggaagtccgcctgagcaaagacgaacaactacaacaacggcgcgctaaccaacgtctgggggcagaagtcatgagccagcgtatccgtgaaatgtctgataacgatccgcgcgtggtggcgctggtcattcgccagtggataaataacgatcatgagtaacctgacaggcaccgataaaagcgtcatcctgctgatgaccattggcgaagaccgggcggcagaggtgttcaagcacctctcccagcgtgaagtacaaaccctgagcgctgcaatggcgaacgtcacgcagatctccaacaagcagctaaccgatgtgctggcggagtttgagcaagaagctgaacagtttgccgcactgaatatcaacgccaacgattatctgcgctcggtattggtcaaagctctgggtgaagaacgtgccgccagcctgctggaagatattctcgaaactcgcgataccgccagcggtattgaaacgctcaactttatggagccacagagcgccgccgatctgattcgcgatgagcatccgcaaattatcgccaccattctggtgcatctgaagcgcgcccaagccgccgatattctggcgttgttcgatgaacgtctgcgccacgacgtgatgttgcgtatcgccacctttggcggcgtgcagccagccgcgctggcggagctgaccgaagtactgaatggcttgctcgacggtcagaatctcaagcgcagcaaaatgggcggcgtgagaacggcagccgaaattatcaacctgatgaaaactcagcaggaagaagccgttattaccgccgtgcgtgaattcgacggcgagctggcgcagaaaatcatcgacgagatgttcctgttcgagaatctggtggatgtcgacgatcgcagcattcagcgtctgttgcaggaagtggattccgaatcgctgttgatcgcgctgaaaggagccgagcagccactgcgcgagaaattcttgcgcaatatgtcgcagcgtgccgccgatattctgcgcgacgatctcgccaaccgtggtccggtgcgtctgtcgcaggtggaaaacgaacagaaagcgattctgctgattgtgcgccgccttgccgaaactggcgagatggtaattggcagcggcgaggatacctatgtctgataatctgccgtggaaaacctggacgccggacgatctcgcgccaccacaggcagagtttgtgcccatagtcgagccggaagaaaccatcattgaagaggctgaacccagccttgagcagcaactggcgcaactgcaaatgcaggcccatgagcaaggttatcaggcgggtattgccgaaggtcgccagcaaggtcataagcagggctatcaggaaggactggcccaggggctggagcaaggtctggcagaggcgaagtctcaacaagcgccaattcatgcccggatgcagcaactggtcagcgaatttcaaactacccttgatgcacttgatagtgtgatagcgtcgcgcctgatgcagatggcgctggaggcggcacgtcaggtcatcggtcagacgccaacggtggataactcggcactgatcaaacagatccaacagttgttgcagcaagaaccgttattcagcggtaaaccacagctgcgcgtgcacccggatgatctgcaacgtgtggatgatatgctcggcgctaccttaagtttgcatggctggcgcttgcggggcgatcccaccctccatcctggcggctgtaaagtctccgccgatgaaggcgatctcgacgccagtgtcgccactcgctggcaagaactctgccgtctggcagcaccaggagtggtgtaatgaccacgcgcctgactcgctggctaaccacgctggataactttgaagccaaaatggcgcagttgcctgcggtacgtcgctacgggcgattaacccgcgctaccgggctggtgctggaagccaccggattacaattgccgctcggcgcaacctgtgtcattgagcgccagaacggcagcgaaacgcacgaagtagaaagcgaagtcgttggctttaacggtcaacggctgtttttaatgccgctggaggaagtcgaaggtgtcctgcccggcgcgcgtgtttatgccaaaaacatttcggcagaagggctgcaaagcggcaagcagttgccgctcggtccggcgttattaggtcgcgttctggacggcagcggtaaaccgctcgatggcctgccctcccccgatacgacggaaaccggtgcgctgattaccccgccatttaacccgttgcaacgtacaccgattgaacatgtgctggacaccggcgtgcgcccaatcaatgccctgcttaccgttgggcgtgggcagcgtatggggctgtttgccgggtccggcgttggtaaaagtgtgctgctggggatgatggcacgttacacccgcgccgatgtcattgtcgtgggtttgattggtgaacgtgggcgcgaagtaaaagattttattgagaacatcctcggtgccgaagggcgtgcacgctcagtggtgattgccgctccggcggatgtttctccgctcctgcgaatgcagggtgccgcctatgccacgcgcattgccgaagattttcgcgatcgtggtcagcatgtgttgctgattatggactccctcacccgctacgcgatggcccagcgtgaaattgcgctggcgattggcgaaccccccgccaccaaaggttatccaccgtcggtgtttgccaaattaccggcactggtcgagcgtgccggaaatggcattagcggcggcggctcgattaccgcgttttataccgtgctcactgaaggcgatgaccagcaggatccgattgccgactccgcgcgggcgatcctcgacggtcacattgtgctgtctcgccgactggcggaagccgggcactatccggctatcgatattgaagcgtcgatcagccgcgcaatgacggcgttgatcagtgagcaacattacgcgcgagtgcgcaccttcaaacagctgttgtcgagttttcagcgtaaccgcgatctggttagcgtcggcgcgtatgccaaaggcagcgatccgatgctcgataaagccatcgccctgtggccgcagctggagggctatttgcaacaaggcatttttgaacgcgcggactgggaagcgtctctccaggggctggagcgtattttcccgacagtgtcataacccaggagataacggcagatggcagaacatggtgcgctggcgaccctgaaagatctggcagaaaaagaggtagaggatgccgcgcgcctgctgggtgaaatgcgtcgcggatgtcagcaggcggaagaacagctcaaaatgctgattgattatcagaatgaatatcgcaataacctcaacagcgatatgagtgccgggataaccagcaaccgctggatcaactatcagcagtttatccagacgctggaaaaagccattactcagcatcgccagcaacttaatcagtggacgcagaaagttgacattgccctgaacagttggcgagaaaaaaaacaacgtttgcaggcctggcagacactgcaggaacggcaatccacggcggcactgcttgcagaaaaccgcctcgatcagaaaaagatggatgagttcgcccagcgcgccgccatgaggaaacctgaatgattcgcttagcgcccttgattaccgccgacgttgacaccaccacattgcctggcggcaaagccagcgatgctgcacaagattttctcgcgttgttgagcgaagcattagcaggcgagacaactaccgacaaagcggccccccagttgctggtggcaacagataagcccacgacaaaaggcgagccgctgatcagcgatattgtttccgacgcgcaacaagctaatttactgatccctgtggatgaaacaccgcctgtcatcaacgacgaacaatccacatcaacaccgttaaccaccgctcagacgatggcgttggctgcggtggctgacaaaaatacgacaaaagacgaaaaagcggatgatctgaatgaagacgtcaccgcaagcctgagcgccctttttgcgatgttgccgggttttgacaatacgcccaaagtgactgatgcgccgtcaaccgtgttaccgacagagaaaccaacgctcttcacaaaactgacttctgagcaactcacaacagcacagcctgatgacgcccccggcacaccagctcagccattaacaccgctggtagcagaagcccagagtaaagcggaagtcatcagcacaccttcaccggtgaccgctgccgccagcccgctaatcactccacaccagacacagccactgcccaccgtcgccgcacctgttttgagtgcaccgctgggttctcacgaatggcaacaatcattaagccagcatatttcgctgttcacccgccaggggcaacaaagtgcagagttgcgtctgcacccgcaggatttaggtgaagtgcaaatctccctcaaagtggatgataaccaggcgcaaatccagatggtttcaccgcatcagcatgtacgcgccgccctggaagcagcgctgccggtactgcgcacgcagctggccgaaagtggcattcagttagggcaaagcaacatcagtggcgaaagctttagtggtcagcagcaggccgcttcccagcaacagcaaagccaacgcacagcaaaccatgaacctctggcgggggaagacgacgatacgcttccggttcccgtctctttacaagggcgtgtaacaggcaacagcggcgttgatattttcgcctaacgtcagaggtagcaccgtaatccgcgtcttttccccgctttgttgcgctcaagacgcaggataattagccgataagcagtagcgacacaggaagaccgcaacacatgactgattacgcgataagcaagaaaagcaagcgatcgctttggatcccgattctggtattcattaccctcgcggcctgtgccagcgcaggttacagctactggcattcgcatcaggttgccgctgacgacaaagcgcagcaacgcgtcgtgccctcaccggtcttctacgcgctggataccttcacggtcaatttgggcgatgcggatcgcgtactttatatcggcataaccctgcgcctgaaagatgaagctacccgctcgcggctgagtgagtatttgccggaagtccgtagtcgcttgctgttactgttttcgcgtcaggatgctgccgtactggcgacagaagaaggcaagaaaaacctgattgccgagattaaaaccacactttccaccccgcttgttgccgggcaaccgaaacaggatgtcaccgacgtgctgtataccgcttttattctgcgataacgacatgggcgatagtattctttctcaagctgaaattgatgcgctgttgaatggtgacagcgaagtcaaagacgaaccgacagccagtgttagcggcgaaagtgacattcgtccgtacgatccgaatacccaacgacgggttgtgcgcgaacgtttgcaggcgctggaaatcattaatgagcgctttgcccgccattttcgtatggggctgttcaacctgctgcgtcgtagcccggatataaccgtcggggccatccgcattcagccgtaccatgaatttgcccgcaacctgccggtgccgaccaacctgaaccttatccatctgaaaccgctgcgcggcactgggctggtggtgttctcaccgagtctggtgtttatcgccgtggataacctgtttggcggcgatggacgcttcccgaccaaagtggaaggtcgcgagtttacccataccgaacagcgcgtcatcaaccgcatgttgaaactggcgcttgaaggctatagcgacgcctggaaggcgattaatccgctggaagttgagtacgtgcgttcggaaatgcaggtgaaatttaccaatatcaccacctcgccgaacgacattgtggttaacacgccgttccatgtggagattggcaacctgaccggcgaatttaatatctgcctgccattcagcatgatcgagccgctacgggaattgttggttaacccgccgctggaaaactcgcgtaatgaagatcagaactggcgcgataacctggtgcgccaggtgcagcattcacagctggagctggtcgccaactttgccgatatctcgctacgcctgtcgcagattttaaaactgaaccccggcgacgtcctgccgatagaaaaacccgatcgcatcatcgcccatgttgacggcgtcccggtgctgaccagtcagtatggcaccctcaacggtcagtatgcgttacggatagaacatttgattaacccgattttaaattctctgaacgaggaacagcccaaatgagtgacatgaataatccggccgatgacaacaacggcgcaatggacgatctgtgggctgaagcgttgagcgaacaaaaatcaaccagcagcaaaagcgctgccgagacggtgttccagcaatttggcggtggtgatgtcagcggaacgttgcaggatatcgacctgattatggatattccggtcaagctgaccgtcgagctgggccgtacgcggatgaccatcaaagagctgttgcgtctgacgcaagggtccgtcgtggcgctggacggtctggcgggcgaaccactggatattctgatcaacggttatttaatcgcccagggcgaagtggtggtcgttgccgataaatatggcgtgcggatcaccgatatcattactccgtctgagcgaatgcgccgcctgagccgttagtgatgaataaccacgctactgtgcaatcttccgcgccggtttctgctgcgccactgctgcaggtgagcggcgcactcatcgccattattgccctgatcctcgctgctgcctggctggtaaaacggttgggatttgcccctaaacgcactggcgttaacggtctgaaaattagcgccagtgcttcactgggcgcgcgtgaaagggttgtggtggtcgatgtggaagatgcacggctggtgctcggcgttaccgcaggtcaaatcaatctgctgcataaacttcccccttctgcaccaacggaagagataccgcagaccgattttcagtcggtcatgaaaaatttgcttaagcgtagcgggagatcctgatgcgtcgtttattgtctgtcgcacctgtccttctctggctgattacgcccctcgccttcgcgcaactgccgggtatcaccagccagccgctgcctggcggtggacaaagctggtcgctcccggtgcagacgctggtgttcatcacctcgttgacgtttattccggcaattttactgatgatgaccagtttcacccgcatcatcattgtttttggtttattgcgtaacgcgctgggaacaccctccgcgccacctaaccaggtattgctggggctggcactgtttttgaccttttttattatgtcaccggtgatcgacaaaatttatgtagatgcgtaccagccattcagcgaagagaaaatatcaatgcaggaggcgctggaaaaaggggcgcagccgctgcgtgagtttatgctgcgtcagacccgtgaggcagatttagggttgtttgccagactggcgaataccggcccgttgcagggacctgaagccgtgccgatgcgcattttgctcccggcctacgtgaccagcgagttgaaaaccgcatttcagataggcttcacgattttcatcccttttttgattatcgacctggtgatagccagcgtgttgatggcattggggatgatgatggttcccccagccaccattgctctgccctttaaactgatgctgtttgtactggtggatggctggcaattgctggtcggttcgctggcgcagagcttttacagctagagaggcaaaatgacacctgaatcggtcatgatgatggggactgaagcgatgaaagtcgcgctggcactggctgccccgctattgttggtagcgttggtcacgggccttatcatcagtattttgcaggccgccacgcagattaacgaaatgacgctgtcgtttattccgaaaatcatcgccgtatttatcgccattattattgccggaccgtggatgctcaatctgttgctggattacgtccgcaccttgttcactaacctgccgtatatcatcgggtagccgtactatgttgcaggtgacaagcgaacaatggctatcctggttaaacctgtacttctggccgttactgcgcgtgctggcgctgatctccaccgcgccgattctgagcgaacgcagcgtaccgaaacgggtaaaactgggtctggcaatgatgatcacgttcgccattgccccatcattacctgccaacgatgttcctgttttttcgttctttgctctgtggctggccgtgcagcagatcctgatcggcattgcgcttggttttaccatgcaatttgcctttgccgctgtgcgaaccgctggcgaaattatcggtctgcaaatggggctgtcatttgcgacgtttgtcgatccggccagccatcttaatatgcccgttttagcgcgtatcatggatatgctggcgttactgctgttcctgacatttaacggtcatttatggttgatttcactgctggtcgatacctttcacaccctgccgattggtggcgaaccgttgaacagcaatgcgtttctggcactcaccaaagcagggagtttgattttccttaacgggctgatgctggcgttaccgctcattactctgctgctgacactgaatctggcattaggtttacttaatcgtatggccccgcaattatccatttttgttattggatttccattaactctgactgtcggcatctctttaatggcggcattaatgccgttaattgcacctttttgcgaacatttattcagtgaaatttttaatttgctggctgatattattagtgaattgccattaatataattccgtaacgtttatcatgttatcctaaggattatccgaaaaataatacctacgaacatcttccaggatactcctgcagcgaaatatttgttttaagctcactcacatatcgcaacatttactttactttaagacaattccaggcaaattatacaacactttacgggatagtaagtccgcctgaaaaatcgcgagagtggcgcattaggtgacccatgttgttccgtttagtcatgatgaaatattcaggtaaggggaattatcgttacgcattgagtgagggtatgccatgtcaacgattattatggatttatgtagttacacccgactaggtttaaccgggtatctgttgagtagaggggttaaaaaaagagaaatcaacgacattgaaaccgttgatgaccttgccatagcttgtgattcacagcgcccttcagtggtgtttattaatgaggactgtttcatccacgatgcttctaacagtcagcgtatcaagctcatcattaatcaacatcccaatacgttatttatcgtttttatggcaattgccaatgttcattttgatgaatatctattggtcagaaaaaatttattgatcagttctaaatcgattaaaccggaatctctcgacgatatccttggcgatattctgaaaaaagagacaacgataacctcgtttttaaatatgccgacgttatcattgagccgaaccgaatcgagtatgttgcgaatgtggatggcaggtcagggaaccattcaaatctctgaccaaatgaatatcaaagccaagaccgtttcatcgcataaaggtaatattaaacgtaagatcaaaacgcataataaacaggttatctaccatgtcgtccgactgacggataatgtgactaatggtatttttgtcaacatgcgctaacacattctgactggtggtttcccaccagtcaggctgaataagattactctgctttctccacaaagataccgtcctgatgccctgcttcattaaagaaccagatgccgagcgggtagtcttccagcgaaaccaggtacattgtgccttcactaaactcctcaactgccagtaccacgccaggacgacgcggaccgccatccgttttgactgttacccgatcattcaccttcatcgttttcctcctgtggctttgtgccagtgtagaacaatttcgtttttctggcagcgccaggcgcgcgcgagtgctgattttctcgacggtctatacttaagagatgccaggcggacttaacgactggcggcaacaacagagtaacggttgcgaggaaagatgatgaaaaccgcaaaagagtacagcgataccgcaaaacgtgaggtcagcgtcgatgtcgatgccctgctggcggcgatcaatgaaattagcgaaagcgaagttcatcgcagccagaacgattctgaacacgttagcgtcgatggacgtgaatatcatacatggcgtgaattggcggatgccttcgaactggatattcatgacttcagcgtctctgaagtgaatcgttgaatgcacaataaaaaaatcccgaccctgagggggtcgggatgaaacttgcttaagcaagaagcacttaaaaaattcgttacaccaggaaatctgatgtgttcatcaccttatccgcaatttttttcgctgacaagaaaatattcgccatatgaatgattaacgctacttatgaatagaaatgtgacgcacgtcaccccttggtggctctggcgtcagcgggatcgctcccgaaaaaatcatctttgataatttgtgcggttttgagaatcatcctggtaagaggagtactgcgcgactatgttttcaattcaacaaccactactggtttttagcgatcttgatggcaccctgctggacagtcatagttatgactggcaaccggcagccccctggctcacccgtttacgcgaagcaaatgttcccgtcattctctgtagcagtaaaacatcagcggaaatgctgtacttgcaaaaaacgttggggctacaaggtttaccgctgattgccgaaaatggcgcagtgatccagcttgctgagcaatggcaggagatagacggttttccacgcatcatctcaggtattagccatggcgaaatcagcctggttttaaatacgctacgcgagaaagaacattttaaattcacgacttttgatgatgtcgacgatgcaaccatcgccgaatggacgggattaagccgtagccaggcggcgctgacgcagcttcatgaggcgtcggtaacgctaatctggcgcgacagtgacgagcgtatggcacaatttaccgctcgtctgaacgaactgggcttacagtttatgcagggtgcgcgcttctggcacgtactggatgcttctgccggaaaagatcaggctgccaactggattatcgcgacctatcaacaattgtcaggcaaacgcccaaccacacttggcctgggcgatgggccaaacgatgcgcccttactggaggtaatggattacgcggtgattgtgaaagggctaaatcgtgaaggggtgcatctgcatgatgaggatccggcccgcgtctggcgaacgcagcgtgaaggaccggaaggatggcgtgaagggctggaccattttttctccgcccgttaagcgttatcgctcgcgaatacccgattacgcccagcctgtttagcgagataaagccgacggtcggccagtgactggagttgttcaaaatcataatcaccggtttcctcgctgctgcttacccccagcgaggcactgatgcgtatcgtcgtactcttggcgatcaacatctctttttcatttaatttcagtcgaatacgttctgcgacctccgcagcctccgtcagactcgcgcctggcagaatcacacaaaactcctcaccaccgacccgcccggcaacgtcctgcgcacgcaaggaactgctaattaatccggcagcatgagaaagaacacggtcgcccgcctgatgaccaaagcggtcattaatcgctttaaaatggtcaagatcgacctgaatgacagaaaaaggatgttggtgcgtctgacacaatttagcgagcggacgggctttttcgaacagtgcgccacggttatataaacgcgttaaggtgtcgtgccacgcctgccactgcaacgagctttgcagaacatacatgttgctaaccatccggcgaatcacataccaggagatgagtaacatggtggtaaagagcgcccacagcagggttaatgcaatgctgatactgccgaaatcgccgcgcacgccttcgcttaacgtatggacacgcaccagcacaccgtcgaaatggtccagacgttcccagctaacatagcgactgtccatacgaatgccgccccgcgtgtcatgttccattgcctgcgccagcaaggccagttcacgaggatcaaaaatattccctgttggatggtcaggattggaagaggtcaaaaatctcagcttactgtcatagagctgatactcaccatcgaggtttttatcgatggcgtttcttaaaaattgctgcatagtacgcacgggaatactcatccccagcacgccataccagtagttattactgtctaccggaacactgacggtaacctgcggttcagtattgctggcgtgttccggttgcgaagtgaaccagcgtaccgcgcggtgacgattttctcgttgtgaatggccaataaaccagggttgggtgacatagccgtaataacgcgttggaacattgcgcgtaaacaaggtcggctgcgtcgaaacgtaaaatccggcacgcgagacatacatcgcctgttcaaccatcgacgaggagttgtgcgctagtcgcagcaagtaaccaacttccagtgcagcggtaatttcattgtcgaggctttcattttcgcgagacaggagattcccctcgctgactaatgcatccgacacaccattaactggcagagtgcgtcgtcggttgagttcgattttccaggcgtgctcgtcgcgatgctgttcgaactcggttacagcatcacgcagagaggtgaaatccagtggcgctacgagagcttcgcgcatgccattacgtaaaaagatcagtttgtcgacgttatactgcaaatgcttatcgagcgcgttggcaacgttttccagatgattacgctggctggagatataggcatcttccagcaccaccacttcacgccaggtgagcaaggtggaaaaaagcaataccacgataaagcagagattaacgacatgaccaggccccaggcggcgtgcgagttttttcaaccagctctggttttccatttttgtctcgtgctgcaccctgacgactcccaacctgcttttttatgattctggcataacctggcgatagcgtaccgcaaaacagcgataattttataatggtggcatgataagacgcgactatcattcattgcaggcattagcacaccaggccggatgtgatccggcctgatgttaatgataccctttcacacttcttccgcagaacgactcccctcccccggaacaagctcggtttcatgaaaagcttcccgcttgaccccgtaaccgtcataccaacgacactcaaccataccgctggagtatccagtgacaatcatccgcgggccgccctctttaaccgtaacttcctcactaaccataaagctcatactcgcctccttttttcgagtgaaacttgttcaccttagttgaagatggcgaattttgcataatagccagtgcgagtattaatgtgcctgaccgcgcattttctctacggctttcactcccagcaccacgatgccgccgatgataaatccaagaatcagatttaaaacagtcggtaatatcatcgccactactgcactttgctgcccggcgaaatgttcaatggcgtgatgcagcggcgcaattccatgtaccacaatcccaccgccgacgaggaacatcgccagcgtgccgacaatcgataacgctttcatcagccagggcgcgataatcaataaccctttacctaatgcctgcatcagcgcgctggatttttccgccagccaataccccaggtcatcaatcttaacgataacccctaccagaccgtagacgcccacggtcactaccagcgcgatgcctgaaagcaccagcacctgattaagcaacggcgcttcggccacaatccccagcgtgatggcgacgatttccgcagacaatataaaatcggtacgaatcgccccttttattttgtccttttcaaacttcagcggatcctgcgccgccagcttctccagacgctgctggctctgcgccggatcttctttatgtttacgcgcctccagcatatgcagcactttctctactccttcaaagcagagaaacgcgccaccaatcatcaacagaggcgtaatcgcccacgggataaacgcactgatgatcagcgccagcggcaccagaatcactttattaatcagcgatcctttcgccacgccccagaccacgggaagttcccggttggcccgcacgcctgaaacttgttgcgcattgagcgataagtcatcccctaatacaccggcggttttcttcgccgccagtttgcccatcacggagatatcgtccagtagtgtggcgatatcatcgagcaacgtcagtaaactactcccggccaaaagcattccctctcatttttattgttgaagggtgtaagtatgaagcaaaaacggcagctctgatacttgcttcacaggtcaacatttttttaacaatcaagtgcaattatatctctcgccagcagaatgattttcacgtttactatgaaccacctttttatttccaccgtgagggattatgcgtttccgccagttgttaccgctttttggcgcgctgtttgcgttgtatatcatttggggctcaacctattttgtcattcggattggcgtggaaagctggcctccgttaatgatggcgggcgttcgattcctggcagccggtattttattgctggcatttttgctactgcgcggacacaaactccccccgctacgtccgctgctcaatgccgcgctgattggcctgttattgctggctgtcggtaatggcatggtgacggttgccgaacatcaaaatgttccttccggcatcgccgccgtagtggttgcaaccgtgcccctctttaccctgtgcttcagccgcctgtttggcattaaaacgcgcaaactggaatgggtgggtattgccattgggcttgccggaatcatcatgctcaatagcggtggaaatttaagcggcaatccgtggggcgcgattctgattttaatcggctcgattagctgggcgtttggctcagtttatggctcgcgcattaccttacctgtagggatgatggcgggtgcgattgagatgctggcggcaggcgtggtgttaatgatcgcgtcgatgattgcgggtgaaaaactgacggcgctcccttccctttcaggcttccttgcggtcggctatctggcgctgtttggttcgattatcgccatcaacgcttatatgtatttaatccgtaatgtcagtccggctctcgccaccagctacgcttacgttaacccggtggtcgcggtcttgctgggtacgggactgggtggagaaacactgtcgaagattgaatggctggcgctcggcgtaattgtcttcgcggtggtactggtcacgttgggaaaatatctcttcccggcaaaacccgtagttgcgccagttattcaggacgcatcaagcgagtaaatgaatcccctgcgtgtcgatctgcgcgctggcaccttcgccgcagatccactcttccagacgctcggtaagcgcttcatccgtcagcttctcgcgcccacgtaacgcgcactcccagacaatcaatacgcgccagccgagttcctgcaagcgactgatatcgcggcgatcgcgctcaacatttttacctatcttctccagccagaactcggttcgagtcgcaggcactttaaacagatagcagtgatgatgatgccagaagcagccatgggtaaatatcacgcagcgatattcatcaacgacaaaatccggacgtccgggcagactggcgtcctgaacgcgaaatgccaggccctgcccggttaacagactggcgaggcgcttctctatcgccgtatcacgcgtggcaatcgcgcgcatatttttgctgcgagtggccttatcgtgaacgtcggccatgttgtgcctcttgctgacgcaacgccaccgcctgtttgatttttggctcaagcagttttgccaccgcggcaaagaccggcacgaccaccgagttaccgaactggcgataggcctgagtgtccgaaaccggaatacggaatttcgcttctcccggcgcttcaaaacccattaagcgcgcgcattcccgaggcgttaaccgacgtggacgatgttgctgattcagcggatcgtcaaagtctttctcacccgtggccatatcccagccgcgatcgattaaaatttccgcgccatctttgtaataacgcgcagacagcgtacgcgtgacgctttgcggattgttcggataaaccattccataaccgaagccgttaccgcgcgcctgatgttttttcgcatatcgatagaggtacttccacagcaccggcgtcaggatatatttcgcctcgaccatcgggtccaacagctgcgccagcgtcactcgctgcgcagggaaacattcgctgatatcacgcagggtaaaatcggctttcagattcagatcgcgacgaaaacccaccagcacgatgcgttcacggtgctgcggcagaaaatgtttgccgtcgatgattttcggatcgtctggcccattatcttctgcatcagccacgtcatagcccagttcgtccagcgtctgcatgatgatgcggaacgttttaccctggtcgtgacttttcaggtttttgacgttttcgagcacaaacatcgccggacgacgcgcgtcgataatgcgtaccacatcaaaaaacagcgtgccctgggtatcgcaggcaaaaccgtgcgcccgcccgagcgagttctttttcgatacgccagccagcgaaaatggctgacaagggaaaccggccagtaaaacatcgtgttcaggaatgtgttgacgaatatgttccgccgccgcctcatcactcacgccttctttatggctgagggtgatgtcgcggatatcttcattaaaatgatgcgtcgccggatcgcaataatggttggctttataagtgcgtaccgcatgtttgttccattcgctggtaaacacgcactgtccgccaatcgattcaaaaccgcgacggatgccgccaattccggcgaatagatcgataaagcgaaacgcataatgcggatgatgtgccggtggtttgggtaataacgtttgcagatgggcgaactctttctcacttaaacggtgccatgccgagtcattcgccagcgcacgttttaaaattgccgcgctccagtgattctcacctacaccattaagctgcgccaccaacgttttaacatcataaatttgcagcagtttctccagcattgcctgtgcggcattcccggtgctgtatgaatcggttactgatatattttcctgcatagatttcaccggccatctgagatggccgacaggttaacataattacagccatttagggccacgcgctcagccagcggatgaaaacgcatctatcaccttgtgatcaacaccttcattctcccccgccagttcggcactgagcttcgccataaactcgactaaaaaatgcgcgttgtgctgcgccagctgcttgcctcttgcggtttgcatggtttgcggtagcttcagcaacttagtctggaaatgatccagcgcgtagcgtttatcatcaagcgggcgatgctgtgcgaacggatcttcaccatcaaacagcgccacgcccaatgcccctgaaacggcaaacacgcgcgccaggccaatcgcccccagggcttccagccgatccgcatcctggacaattttagcttccgttgttaagggggcgatttgcgcgctgaaactgtgagcggcaatggcatgacaaacggcctcgattttctccgccggaaattgctcgaactcttcacggagcaggcgacgcgtctcttctgccgccaggattgaagaacgctgcctttgcggatgatttttcgccaggctcacaatatcgtgaaaataacaggcggttaaaatcaccagcatatcgacatcgtcatctgccgccagcttctgtgccgtagcccagacgcggcgaaaatgacacacgtcatgggccgcgtcctggtgctgatgatggtttttcaaccagttttcgaactgtgcctgccagtgttgtaagtccatacgcgctccgttgccaaagagtcgccaccttagcagtttttattcatagcgtctgctacgtgcgggacgaggtcgggtgtaccaggcaatgctgcctaacaatgccccgaccagagccataaataaaaatccgaccagtgcccctaaccactttcccgcggtagagcctaaatcgctttcaaatcccgacacgggggcatcgggaatccggctcatcacccagatgtaacgcgccattgcccagacgaaatagccacaccatgtatagaaagcccacaaagccagtttgccgccagggctgcgagagagtctctcttccatctttgtcgaaccgtattccattttgagataacccggaaaattcagacttagtactattatgtgataaaagtcacatttttccacattggatgagccagtcaagactcaatcattttttgaacaaatagataaattttgcgcaacggcagtgaatacaggaaaaatcgttttgagcgattttatttatctttgatatcggctttattaattcatttaatcaatatattagcactgattacaattatacctttttattattctgtgtcatgatgcttccgttattagccttttatcgtcttgtttatattttttgggccggcatgatgccggcttttttttatgccttcattaatgtgcgcctgatcacaccagccgtttggcgcaacaatcattgataccccctatgtttccgctcaactcataacatattgatatacatttataattttcatgaatatttatatttagaattcataattatgaattatattaaatagattagaaacattttgatatcttttaaatacatttgttacatgtaatccttaaaataaaatgaacttcatagaatagtatccaaatgtgcttttttttggataacggcacttattgatatattcatgaagattataatcacaagggaatacataatgaaaagaaaagttctggcaatgctggtcccggcgttattagttgctggcgcagcaaatgcggctgaagtctataataaagatggtaataaactggatttgtacggaaaagtagtgggtctgcactacttctctgatgattctggcagcgatggcgacatgtcatatgcccgtatcggtttcaaaggtgaaactcagatcgctgatcaattcactggttatggtcagtgggaatttaacattggcgcaaacggtcctgaaagcgacaagggtaataccgcaacgcgtctggcatttgcaggtttaggctttggtcagaatggtactttcgactatggtcgtaactacggtgtcgtatatgacgtagaagcatggaccgatatgctgccagaatttggtggcgatacctatgctggcgctgacaacttcatgaacggtcgtgctaatggtgttgcaacctaccgtaacaatggcttctttggttaggtcgatggcttgaactttgctttgcaatatcagggtaataatgaaagtggtggaccattcgggcaggaaggttccggtagtggtgatggccgtagcctttccaaagaaaatggtgatggtttcggtatgtcaacatcctacgacttcgacttcggtttaagtctgggtgctgcatatcaaactctgatcgttcagatcgtcaggttggagttggtttaaatgatcgtaaccatagcaacagaaatgctggtggtgaaaccgctgaagcatggactgttggtgcaaaatatgatgctaataatgtgtatttagcagctatgtacgctgaaactcgcaatatgaccccatatggtggtggcgagtttgataatggtgaatcaagatcagccatcgctaacaaaacccaaaactttgaagttgttgctcagtatcagttcgactttggcctgcgcccgtccatcgcttacctgcaatctaaaggtaaggatttaggcggttgggctcatgacggcaacggcgacccacgttacaccaataaagatctggttaaatacgttgatattggtgcgacctactacttcaacaaaaacatgtccacctatgttgattacaaaatcaacctgctggacaacgacgatgacttctacgaagcaaacggcatcgctaccgatgatatcgttgctgtgggcttagtctaccagttctaatcagtcaactcgctgcggcgtgttactgtaaaactgaacactagcctgagttcgtccctcatcgaactcaggcttttttattggcatttcatctccatctgcggcacacgcaattgccgaagcatatcgatacagcaccttaccctgcccctcctggcacaataacatcaaccagctactcttcaagctaacacccaaatgcatttctttatgaattaatccgtaacaaacacgcttcccatatagaaatatttgcaaaaatagtgcatgaaataagctttttctctaccaatccgggatataaatattcatcagcaccacaatattccacagcactaaatctctccccgccaccccgtacctctgataatggtctaaaatcattgaagccacttgcgacgacgttgctcaataaggaaaatttggcgtgaataatattcaacaccagtgcagcatcatcattacatacttacagccgccgactaccgctttcgatatattgactcaattttccagcctggttaaaaatagcgaccagctcagtcgcaaatatagtgactaccctaactaagcaacaataaggaatacactatgactgttcaaacaagtaaaaatccgcaggtcgatattgctgaagataatgcattcttcccttcagaatattcgcttagccaatataccagtcctgtctctgatcttgatggcgtggactatccaaaaccttatcgcggtaaacataaaattctggtgatcgccgcggacgaacgttatttgccgaccgataacggaaaactgttctcgaccggtaaccatccgattgaaacgttgctgccgttgtatcatctccatgctgcaggtttcgaattcgaagtggcgaccatttccggtctgatgaccaagtttgaatactgggctatgccgcacaaagatgaaaaagtaatgccattctttgagcagcataaatcgttgttccgcaatccgaagaaactcgcggatgttgttgccagcctcaacgctgatagcgaatatgcagcaatctttgttcctggtggtcatggcgcacttattggtttacctgaaagccaggacgtggctgccgctttacagtgggcaatcaaaaatgaccgttttgttatctccctttgccacggcccggcggcttttctggcgcttcgccacggcgataacccactgaatggttattccatttgcgcattcccagacgccgcagacaaacaaacgccagagattggctatatgccgggtcatctcacctggtacttcggcgaagaactgaagaaaatgggcatgaatatcattaatgacgacatcaccgggcgagtacataaggaccgtaaacttctcaccggcgacagtccttttgcagcgaatgcgttgggtaaactggcggcgcaggaaatgctggcagcttacgcgggttaatccctgttacgtttgaatgtaagcgcataatcaatcgcggccgcgttagtactcacgacgtggctgcgttttttcacggttaatttatggcgtactgaagccctatgttaatttctttgcggtaacgtaatccggaacacattatgcttattgagatagtgatacgtagcacttcccccatgcaattcggcaatcgctttgactaaagaaaggcctagtccctgacctacggaatgacgcgaattatctccccgccaaaatctacggaagagtttttcaggctcattaattttcgttccagggctggcgatatcaatattaagatagctgttggtatcaagaaaactggttatatgaatacgcgatttttctggcgaatatctaatggcattaacaataagattcgataacattcgttgtagtaaaattttatccgcaaagatttgctgattgcactcgaccttaaagcaaatctctttctcgtctgaaaggtattcaagatagtccaacaaattttcgacttccttattgagagaaagcgagtccagtttcaccaaaacattgtttttatctgccctggcaagaaacagtatgttctctgttaaccgcgaaatattttccagctcttcaatgtttccggcaattgttttttgatattcagcgatacttctggtttgactgagcgtaacctgattctgacccagtaatgcattaattggcgttctaagttcatgagcgagatcgtcagcaaactgacttagacgctcaaaatctttgactaaagcatgatgcattttattcaacgcctgcccaagaggttttagttctctcggtaatgcgctaacctcaacaggctctcggctatcgttataattcagcgcttccgttacaccactcaactttttgatctctcgtaatcccgttctgattaacagcggacttaatactgagcaaagtacaatggcgacaatgcaaattataatgctattaattttatactgttcaagcatgttatgtctggctgaagccaatttagccacagtaaccgttaatgatggcgaaacttcatcaatattaattcgtaaagcatctatctctgtatcattaataatgcttctgtaaatgccagctgcgctgattgtctcactagcaggtatgttatttaacatgccatcactgacatttgtccggttaacaattttattgatgctatcaccatgaataatcaagatatcctgactaacatccatcatccggttaaagtacacaggtaacgtatctggatttaccccatcaattaacaactgcttgatctgcgctgtccggttaatgagtgttgtatcatcgcgccatttcaactcacttgccaggccattatagagagtccagacaattccggcgccagcaacagacagtagcaatataaaaagcaaggttaaacggacggttatagatagtcttttcattatttttttaccgctacgaatgaatagcccatcccccggattgtggcaattagcttttcaggaaaaggatcatcaacttttgcgcggagcctgcgaatggcgacgtccaccgtattggtatcactatcaaagttgattccccaaatttcactcgcaataaccgttctgggtataatttcgccagctctggaggccagtagccaaagtaactgaaactccttgcgcgtcagtgtaatactgatattgtccctgctcacactatgactaacagagtccattcttaagccgctgatttctaatgttgaattcaaagcgtgatgttgccttaattgtgcccgaacccttgccagcaactcagaaaatgaaaaaggttttaccagataatcatttgccccactgtccagccctctgactctgtcatcgacagaatcccttgcagtaaggcaaataacaggggtttgctttgctgttcttaacgtttgtaagatctgccagccatccatacccggaagcataatatccagaatgatcaatgcataatcatccttcagcgcaagataaagcccatctctgccatcagaaacggcatcgatgacataacccgcttcggaaagcccctgcgttacccattcctgggtcctttgattatcttcaataagtagaatcttcatgaaaataatatgccataaatcatatgttatagaaacagcctggttcattacaaaattgtaatgctgctgtaaggttaccctggacgctttttcgctatcctcaaaactcattcacatgacaaggatataaacatgttaaagcgttatttagtactctcggtagcaacggcagcattttcattaccttctttggttaatgccgcacaacaaaacattcttagcgtgcacattttgaaccagcaaacaggaaaacccgctgctgacgtgacagtcactcttgaaaagaaggcggataacggctggttacaacttaataccgccaaaacagataaggatggacgaattaaggcactgtggcccgagcaaactgcaactacgggcgattaccgtgtcgtatttaaaaccggggactatttcaagaaacaaaatcttgaaagtttcttccctgagatccccgttgaatttcatattaataaagtgaacgagcattatcatgtgcctttattacttagccaatatgggtattcaacctatcgtggcagttaatgcataaatatgtaaaagcagatctctgctactgttagggaggacactccctgacagattaacagtaaacggctcttgctggctaacgacaaaaaagtgtgatggcttatgaaaaagaatcaatttttaaaagaatcagatgttacggccgagtcggtattctttatgaagcgtcggcaggtgttaaaagcactgggcatcagtgcaactgcactttctttgcctcacgctgcgcatgccgatctgcttagctggtttaaagggaacgatcgcccgcccgcccccgccggaaaagcgctggagttcagcaagcctgccgcctggcaaaataacctgccactgacgccagcagataaagtttccggttataataacttctatgaattcgggctggataaagccgatcccgccgctaatgctggtagcctgaaaaccgatccatggacactgaaaatcagcggcgaagtggcaaaaccattgaccctcgatcatgatgacttaacccgtcgcttcccgctggaagagcgtatttatcgtatgcgctgcgtggaagcgtggtcgatggtggtgccgtggattggttttccgctgcacaaattgctggcgcttgccgaacctaccagcaatgcgaagtatgtcgctttcgaaacaatttatgcaccggaacagatgccaggccagcaggaccgctttatcggcggtgggctgaaatatccttatgtcgaaggattgcgtctcgacgaagcaatgcatccgctcacactgatgaccgtaggtgtttatggcaaggcgttaccgccacaaaatggcgcgccggtgcgactgattgtgccgtggaaatatggctttaaagggattaaatcgatagtcagtattaagctgacccgcgagcgtccgccaaccacctggaatctggcagcgcctgacgaatacggtttttacgccaacgttaatccgtatgttgatcacccgcgctggtcacaggctaccgaacgatttattggttcaggcggcatcctcgatgtacagcgccagccaacgctactgtttaatggttacgccgcccaggtggcatcgctgtatcgtggcctggatttgcgggagaatttctaaatgcgtctgacagcaaaacaggtgacatggctgaaagtttgcctgcatcttgccggattgttgccgtttctctggctggtctgggcgatcaatcacggtggactgggtgccgatccggtgaaagatattcagcattttactggtcgcactgcactgaaatttttgctggcgaccttgttaatcacccctctggcacgctacgcaaaacagccgttattgatacgcactcgccgcctgttaggattatggtgctttgcctgggcgacactgcatttaacaagttacgcattgctggagctgggcgtgaataatctggcgttattaggtaaggagttaattacccggccttatttaacgttaggtattatcagctgggtaattttgcttgctttagcgttcacttcaacccaggcgatgcagcgaaaactcggcaagcactggcaacagttgcataatttcgtctatcttgtcgcgattctggccccaatacattatctgtggtccgtgaagattatttcaccgcagccgctcatctacgctgggctggctgtactgcttttagccttacggtataagaagttgcgttccctttttaaccggttacgcaagcaggttcacaacaaattatctgtataacttcatattgccgacaaagtacgcgttatccctgccggatgtggcgcgagcgccctatccggcatacacagatcgcatcaggttatgtttcgtttgtcatcaacctcaaatcaccaaaataatttattttatttcaataagatagataagtagaactgagaaagccatgctctcgtttcctaagagttgttgcattttgctatatgttacaatataacattacacatcatatacattaactctggaggaaactgttttggcgattcgtctttacaaactggctgttgctttaggtgtctttattgttagcgctcctgccttttcgcatggtcatcactcacacggcaaacccttaacagaggtcgaacaaaaagctgctaatggtgtttttgatgatgccaatgtacaaaaccgaacgctcagtgactgggatggagtctggcaatccgtttatcctttactgcaaagtggcaaacttgaccccgtctttcagaagaaagcggatgcagataaaactaaaacatttgctgaaattaaagattattatcacaaaggttatgcaacagatatcgagatgattggcattgaggacggcattgttgaattccatagaaataatgaaacaacatcgtgtaaatatgattacgatggatacaaaatactcacctataaatcaggcaagaaaggcgttcgttacttattcgaatgtaaagatcctgaaagcaaagcccctaaatatatacaatttagcgatcatataattgcaccacgaaaatcatctcattttcacatttttatgggtaatgattcacagcaatctttattaaatgaaatggaaaactggccaacgtattatccatatcagttgagtagcgaagaagtggtcgaggaaatgatgtctcattgagtattctcatgataacgcctcgatgccgctttagtaagttatcataactgccactggtccatccacaaacgccactgaacgcaagctagctacagacacgctcatcactatgacgtgtctgtatattaataagctaacccgcattgagttaaccaataacggattccatacacaatacggccaacagagaaagatacctgtgctcacgccattgcttatattggctggttacaatatgcactatcaattttttaaataacaaattattaaaaccacatctgtataaggaatttttaaggttcgtgggatagcttgactgtgaaaatcacaggagctacaaaaatgaaccgattctcaaaaactcaaatttatttacattggataacgctgcttttcgttgcaataacctatgccgcgatggaactccgtggctggtttcctaaaggtagtagtacttatctgctgatgcgagaaacacattacaatgcgggtatattcgtttgggtgttaatgttttcacgcctgattataaaacaccgttatagtgatccttctattgtgccaccgccacctgcctggcaaatgaaagcggcttcgctaatgcacatcatgctttatataaccttccttgcacttcctctgctggggattgctttgatggcttacagtggaaaatcgtggagtttccttggtttcaatgtgtctccctttgttaccccaaacagcgaaattaaagcactgataaaaaatattcacgaaacctgggcaaatataggctactttttaatcgcagctcacgctggcgcagcactctttcatcactacattcagaaagataatactctgttacgaatgatgcctcgccgcaaataagtcgatccccttacaaggaaatgtgaaccatggacatcaacgcgtcataaatgtttacgcaagtgcacaatgcaccctttccactatcaacaaggaggagcagaaactgtgtaaatcgtacaatggtaagacttatcaaaaatacaggttaattttggtatttaaaccttttttacttgttagtatgatacaaaggctttcaaaaaagctgcgaaattcaacaactcttggaaattatggactttgtcccgcggctttaatctgacggccgcgttccttttttgactcaattattgaacccttctctacgcaacttcagttcccaccaccaactttgcggcagtttcataggatgaatgtctaaaagaataatggtgagcgataagaaaacgactgaataactgcacattttcgctcgaaagcttcctgtcagatccatagcgaatcaagtgctgaatgtcacagtatcgaacagaaaacagtgacgatctaacccttcaagaatattctacgattgttctgtttaggaaaagcaaggcgggaagtcgggagataagtcattgataaagtggcggagagagggggatttgaacccccggtagagttgcccctactccggttttcgagaccggtccgttcagccgctccggcatctctccgttcagatggttgccatgatgccaggaaatttggcattttaacagtccctgtccgtgcaattttgttcaagtgacgagtttgcgagcaaaacgatgattaagtggccctggaaagtacaagaatcagcacatcaaactgcccttccctggcaggaagcactatcgatcccccttttaacgtgtctgacggaacaggaacaaagcaaattagtcactcttgccgaacgttttttacagcaaaagcggcttgttcctttacagggctttgaactggattcattaagaagctgccggatagcacttctattttgcctacccgttctggagttaggactggaatggctggatggttttcatgaagtcttaatttatcctgcgccatttgtggtcgatgatgaatgggaagacgatatcggtctggtgcataaccaacgtattgttcagtcaggtcagagctggcagcaagggcctatcgttttgaactggttggatatacaagattcttttgatgcttctggttttaacctgattattcatgaagtcgctcataagctggacacccgtaacggcgatcgcgccagcggagttccctttattccgttgcgtgaggttgctggctgggaacacgatcttcatgctgcaatgaacaacattcaggaagaaatcgaattggttggcgagaatgcggcgagcattgatgcttatgcagccagcgatcctgctgaatgttttgccgtactttctgaatatttctttagcgccccagaactttttgctcctcgtttcccttcattgtggcaacgtttctgccaattttatcaacaagatcctttgcagagactgcatcacgctaatgatacagactcgttttcggcgacgaatgttcattaattaacaactttgcagattaattaaccaattgaaatgacttatgaaatttagtgttgacagacaaggtaccgctaagtaatattcgccccgttcacacgattcctctgtagttcagtcggtagaacggcggactgttaatccgtatgtcactggttcgagtccagtcagaggagccaaattctaaaaattcgcttttttagcgcaatgtcactgaccttagttgaacattgttttttaacggatagcgggtttttaacatcttaagcgccctcgacctttatggttgagggcgttttgctatgaacgccatcaccattttcccctcgattataaaacttgagttattcagtagtctcccctcttgcaactcacacccaaaactgcctaacgaaaagttattaattttcaatcatattgctatcagtatttacattttttcgctgtgctagaaagggcgcatttatgttagctcgttcagggaaggtaagcatggctacgaagaagagaagtggagaagaaataaatgaccgacaaatattatgcgggatgggaattaaactacgccgcttaactgcgggtatctgtctgataactcaacttgcgttccctatggctgcggcagcacaaggtgtggtaaacgccgcaacccaacaaccagttcctgcacaaattgccattgcaaatgccaatacggtgccctacacccttggagcgttggaatcggcccaaagcgttgccgaacgtttcggtatttcggtggctgagttacgcaaactcaaccagtttcgtacgtttgctcgaggttttgataatgtccgccagggtgatgaactggatgtcccggcacaagttagtgaaaaaaaattaaccccgccgccgggtaatagcagtgacaacctcgagcaacagatagccagtacttcacagcaaatcgggtctctgctcgccgaagatatgaacagcgagcaagcggcaaatatggcgcgtggatgggcctcttctcaggcttcaggcgcaatgacagactggttaagccgcttcggtaccgcaagaatcacgctgggcgtggatgaagattttagcctgaagaactcccagttcgattttctccatccgtggtatgaaacgcctgataatctctttttcagtcagcatactctccatcgtactgacgagcgtacgcagattaacaacggcttaggttggcgtcatttcactcccacatggatgtcgggcatcaacttctttttcgaccacgatcttagccgttaccactcccgcgccggcattggcgcggagtactggcgcgactatctaaaattaagcagtaacggctatttgcgactgaccaactggcgcagcgcacctgaactggacaacgattatgaagcacgcccggccaatggctgggatgtacgcgcagaaagctggctacccgcctggccgcaccttggcggtaaactggtctatgaacagtattatggcgatgaagtggccctgttcgataaagacgatcggcaaagtaatcctcatgccataaccgctggacttaactatacccccttcccgctgatgaccttcagcgcggagcaacgccagggtaaacagggcgaaaatgacacccgttttgccgtcgattttacctggcaacctggcagcgcaatgcagaaacagcttgacccgaatgaagtcgctgcacggcgtagccttgcaggcagccgttatgatctggtggatcgcaacaacaatatcgttctggaatatcgcaaaaaagaactggttcgcctgaccctgacagaccccgtgacagggaagtcaggagaagtgaaatcactggtttcgtcgctacaaaccaaatatgccctgaaaggctataacgtcgaagccaccgcactggaagctgccggtggcaaagtggtcacaacgggtaaagatattctggttaccctgccggcttaccggttcaccagtacgccagaaaccgataacacctggccgattgaagtcaccgccgaagatgtcaaaggcaatttgtcgaatcgtgaacagagcatggtggtcgttcaggcacctacgctaagccagaaagattcctcggtatcgttaagtacccaaacattgaacgcggattcccattcaaccgccacactgacttttattgcgcatgatgcagcaggtaatcctgttgtcgggctggtgctctcgacgcgtcacgaaggtgttcaggacatcaccctttctgactggaaagataatggtgacggaagctatacccagatcctgaccacaggagcgatgtctggcacgctgacgctgatgccacagctgaatggtgtggatgcggctaaagcccccgccgtggtgaatatcatttctgtttcgtcatcccgaactcactcgtcaattaagattgataaggaccgttatctctccggcaatcctatcgaggtgacggtagaactgagagatgaaaatgacaaacctgttaaggaacaaaaacagcaactgaataacgcagtcagcatcgacaacgtgaaaccaggagtcactacagactggaaagaaaccgcagatggcgtctataaggcgacctataccgcctataccaaaggcagtggacttactgcgaagctattaatgcaaaactggaatgaagatttgcataccgctggatttatcatcgacgccaacccgcagtcagcgaaaattgcgacattatctgccagcaataatggtgtgctcgccaatgagaatgcagcaaacaccgtctcggtcaatgtcgctgatgaaggaagcaacccaatcaatgatcataccgtcacgtttgcggtattaagcggatcggcaacttccttcaacaatcaaaacaccgcaaaaacggatgttaatggtctggcgacttttgatctgaaaagtagtaagcaggaagacaacacggttgaagtcacccttgaaaatggcgtgaaacaaacgttaatcgtcagttttgtcggcgactcgagtactgcgcaggttgatctgcagaagtcgaaaaatgaagtggttgctgacggcaatgacagcgtcacaatgaccgcgaccgtccgggatgcaaaaggcaacctgctcaatgacgtcatggtcactttcaatgttaattcagcagaggcgaaactgagccaaaccgaagtgaatagccacgacgggatcgccacagctacgctgaccagtttgaaaaatggtgattatagggttacggcctctgtgagctctggttcccaggctaatcaacaggtgaattttatcggtgatcaaagtactgctgccctgaccctcagtgtgccttcaggtgatatcaccgtcaccaacacagctccgcaatatatgactgcaaccttgcaggataaaaatggcaacccactaaaagataaagaaatcaccttctctgtgccaaacgacgtcgcaagtaagttctcgattagcaacggaggaaaaggcatgacggatagtaacggggttgcaatcgcctccctgaccggcacgttagcgggcacgcatatgatcatggctcgtctggctaacagcaatgtcagcgatgcacagccaatgacgtttgtggcggataaagacagagcggttgtcgttttgcaaacatcgaaagcggaaatcattgggaatggcgtggatgagacaactctgacagcaacagtgaaagatccgtcgaatcatccggtggcggggataacggtaaacttcaccatgccacaggacgttgcggcaaactttacccttgaaaataacggtattgccatcactcaggccaatggggaagcgcatgtcacgctgaaaggtaaaaaagcgggcacgcatacggttaccgcaacgctgggtaataacaataccagtgattcgcagccggtaacatttgtggcggacaaagcctcggctcaggttgtcctgcagatatcaaaagatgagatcacaggtaatggcgtcgatagcgcaacgctaactgcaacggttaaagatcagttcgacaatgaggtgaataatcttccggtaacattcagctcagcctcttcaggactcaccctgaccccgggagtaagtaataccaacgagtctggcatcgcgcaggccactctcgcaggcgttgcctttggtgagaagacggttactgcatcactggctaataatggtgccagcgacaacaaaactgtgcattttattggcgacacagcggcggcaaaaattatcgagttggcgcctgtcccagacagcataatcgccggtaccccgcagaacagctccggcagcgtcatcaccgccacagtcgttgataataatggctttccggtgaaaggtgtgactgtgaacttcaccagcaacgcagcgacagccgaaatgacgaacggcggtcaagccgtgacgaacgaacagggtaaggctaccgtcacttataccaatacccgctcctcgatagaatcaggagcgagaccggataccgttgaggccagtctggaaaatggtagctccacgcttagcacatcaattaatgtcaacgctgatgcgtctacggcacatctcaccttgctacaggcactttttgatacagtctccgcaggcgagacaaccagtctgtatattgaggtgaaggataattacggcaacggtgtcccccagcaggaggtaaccctcagcgtttcaccaagtgaaggcgtgacccccagtaataacgctatatatactaccaaccacgacggcaatttttacgcaagctttaccgctacaaaagccggggtttatcaattgacggcaaccctcgaaaatggcgattcgatgcaacaaacagtgacctatgtgccgaacgtcgcgaatgctgaaatcacgctggcagcctcgaaggatccggtgattgccgacaataacgatctcacgacactaacagcaacagtcgctgatacagagggcaatgcgatagccaacactgaggtaacatttactctgccggaagatgtgaaggcgaacttcacgctgagcgatggcggtaaagtgattactgatgctgaaggcaaagcgaaagtcacgctgaaaggtacaaaagcaggcgctcatactgttacagcatcgatgactggcggtaagagtgagcagttggtggtgaactttattgcggatacgctcactgcgcaggttaatcttaacgttaccgaggacaattttatcgctaataacgtcgggatgaccaggctgcaggcaacagtgactgatggaaacggcaacccgttagccaatgaggcggtgacattcacgctaccggcagatgtgagcgcaagctttactctcggacaaggcggttccgccattactgatatcaacggcaaggctgaagttacactgagcggtacaaaatccggcacctaccccgtgacagttagcgtgaacaattatggtgtcagtgatacgaaacaggtgactttgattgccgatgctggtaccgcaaaactagcctccttaacctctgtatactcattcgtcgtcagcacgaccgagggcgcaaccatgacggcaagcgtcactgacgctaacggcaacccggtagaaggcataaaagttaatttccgcggaacctccgtcacgctaagcagcaccagcgttgaaacggatgatcggggtttcgctgaaattcttgtgacaagcaccgaggtcggactgaaaacagtttcagcctctctggcagataaacctactgaagtcatctcgcgattactgaatgccagtgcagatgttaattctgcgacgattaccagtctggagataccggaaggtcaggtaatggtcgcacaagacgtagcagttaaagctcacgttaacgaccagtttggcaacccggttgcgcatcaacccgtgacattcagtgcagagccatcctcgcaaatgatcatcagccagaatacggtctctactaatacgcagggtgtagccgaggtcaccatgacgcccgaaagaaacggttcgtatatggtgaaagcatccctgccgaatggagcctcacttgagaaacaactggaggctattgatgaaaaactgacactcacggcgtccagtccgcttatcggtgtctatgcccctacaggcgctactctgacggcaacgctaacctctgcaaatggcactccagtggagggtcaggtcatcaactttagcgtaacgccagaaggggcgacgttaagtggcggaaaagtgagaactaactcttcaggtcaggctccagtcgttttgaccagcaataaagtcggtacatatacggtgactgcatctttccataacggcgtaacaatacagacacagacaaccgtgaaagtcactggcaactcaagcaccgcccatgttgctagctttatcgctgatccatcgactatcgccgccaccaacactgatttaagtaccttaaaggcaacggttgaggatggcagtggtaacctgatcgaaggtctcactgtgtacttcgccttaaaaagcggctctgccacattaacgtcattaacagcggtgaccgatcaaaacggaatcgcgacaacaagcgtgaaaggagcgatgacaggtagcgtcacggtaagcgcagtcacgaccgctggtggaatgcaaacagtagatataacgctggtggctggcccggcagacacctcgcagtccgtccttaagagcaatcggtcatcactgaaaggggactataccgatagtgctgaattacgtcttgttctgcacgatatatcaggcaatccgatcaaagtttctgaagggatggaatttgtgcaatcaggtactaacgtgccctatataaaaattagcgcaattgattacagtctaaatatcaacggtgattacaaagccactgttacaggaggcggagagggtatcgcaacgctgatccctgtattgaatggtgttcatcaagctggtctgagtaccacaatacaattcactcgcgcagaagacaaaataatgagcggtacagtatcagtcaatggtactgacctaccgacaactacattcccttcgcaggggttcaccggggcgtattatcagttgaataatgacaactttgccccaggaaaaacggcggctgattatgagttttcaagctctgcctcctgggtcgatgttgatgctaccggtaaagtgacatttaaaaatgtcggcagcaattcggaaaggattacggcgacgccaaaatcaggaggccctagctatgtatacgaaatccgtgtgaagagttggtgggtgaacgccggcgaggctttcatgatatacagccttgctgaaaatttttgcagcagcaatggctacacgctccccagagcaaactatttaaaccactgtagttcccgaggcatcgggtcactgtacagtgaatggggagatatggggcattacacgactgacgctggttttcaatcaaatatgtattggtcatctagtcccgcaaactcaagcgaacaatacgtagtttccctggcaacaggtgatcaaagcgtatttgaaaagcttgggtttgcttatgcgacatgttataaaaacctgtgattttccgttataatttcttaaagagtgttccattcggggcactcttttttacattccctctacagaactagcccttctctcacagaaaatgaataaataaaaatgcggcaccgccagaatcgcgttcgatgtgactatgatcattttcggtgagtactgctttgatctaaaggctggttttctgtgatgattgaccagcctcagagtattgatgacaccaccgttcataacagatcggcattactatgcataagtactgtctcatattctcgccaaaacactttttaatgcctttgcgaattcatccagacttatattgtcaattttttgcccaacgacgactgactccgagacatcggccattgcgggccatcgcgttttgtaatcagcataaattgcaacaacaggggtattataggcacttgccatatgtaatattgaggtgtcaggagttattgcgatataagcatcttttatgattgctgctgaacgtttaatcgagggtggtaaggataaacggtagacattattataacaatccactaatgccctggctttatcttcacctttgggtccatgaacgatcactattggtatatctgtttcactttaaatttttgctattagattttctgcaatcgataatgaaaatgtacgttcctgcgagctaccttctaaattgaacgcaatgtaagatcctaacgatcgcatttcctcgcgcacctcatcgagtacatcctcacttagtggcaattcatatattggcctgactgctggaaaacccgcctcacgcatcataaatgcccatgtcataggtacgggagcccggagtttctgatccatactggacgcgttcttgcacaaaggggagaagcaattcatggttataccaacaacctgaaaattcgtttttgctttcaactgactgataaataacatcgttttcaggttctttttacgcatcccctcaatgcaaagatccggcgtaccgtattgctgtgttatgttctttgctaaatcttttatttcttttaatgttgcgtgatcctgcatagtcattgtgactaatgttaatttagtctgttcaagtttaagcgcattaaagacttctaaattaattgtcgacgttacaattaaaagatgcttaattttatgcaattcaagcgcccgaataacaggaaagatggccatagcatcgccaatctgatcgggaatatggatgacaacaaagtctgttttttcaatattgaaattataagctttataatcgtagtaactaaatgcaatacgtctcaacaatgatgctaaaaacatacctaacctcgcctccctactggttataatgcaatgcagtctatcagactcatcagggtgccattttgtgcatatgcggacttttatgtttcatatctctaacctgtgggtcctctgcttaatccttaaacaacaccagcaactcctgcgctttcatcttccatcgaatttttcatgttgccgctaatcagccataaaatcatttgcagatgcgctctgtcgaggtagtctcataaggttcgtttatagatcgacggcaatgtgagttaccttttccatactaattataaaaagacagtacaaacaggatcattatggactccacgctcatctccactcgtcccgatgaagggacgctttcgttaagtcgcgcccgacgagctgcgttaggcagcttcgctggtgccgtcgtcgactggtatgattttttactctatggcatcaccgccgcactggtgtttaatcgcgagtttttcccgcaagtaagcccggcgatgggaacgctcgccgcatttgctacctttggcgtcggatttcttttccgtccgctcggcggtgtcattttcggtcactttggcgaccgactgggacgtaagcgcatgttaatgctgaccgtctggatgatgggcatcgcgacagccttgattggtattcttccttcattctcgaccattgggtggtgggcacctattttgctggtgacactgcgtgccattcagggatttgcagtcggcggcgaatggggaggcgcggcgttgctttccgttgaaagtgcaccgaaaaataaaaaagccttttacagtagcggtgtacaagttggctacggtgtaggtttactgctttcaaccggactggtttcattgatcagtatgatgacgactgacgaacagtttttaagctggggctggcgcattcctttcctgtttagcatcgtactggtactgggagcattgtgggtgcgcaatggcatggaggagtccgcggaatttgaacaacagcaacattatcaagctgccgcgaaaaaacgcatcccggttatcgaagcgctgttacgacatcccggtgctttcctgaagattattgcgctacgactgtgcgaattgctgacgatgtacatcgttactgcctttgcacttaattattcaacccagaatatggggctaccgcgcgaacttttccttaatattggtttgctggtaggtggattaagctgcctgacaattccctgttttgcctggcttgccgatcgttttggtcgccgtagggtttatatcacaggtacgttaatcggaacgttgagcgcatttcctttctttatggcgcttgaagcacaatctattttctggatagttttcttctccataatgctggcaaacattgcgcatgacatggtggtgtgtgtgcaacaaccgatgtttaccgaaatgtttggtgccagttatcgctatagtggcgctggagtcggttatcaggttgccagtgtggttggcggtggatttacaccttttattgccgctgcactcatcacttactttgccgggaactggcatagcgtcgccatttatttgctggctggatgcctgatttccgcaatgaccgctttgttgatgaaagacagtcaacgcgcttgatagcctggcgaagatcatccgatcttcgccttacacttttgtttcacatttctgtgacatactatcggatgtgcggtaattgtatggaacaggagacacacatgaataataagggctccggtctgaccccagctcaggcactggataaactcgacgcgctgtatgagcaatctgtagtcgcattacgcaacgccattggcaactatattacaagtggcgaattacctgatgaaaacgcccgcaaacaaggtctttttgtctatccatcactgaccgtaacctgggacggtagcacaaccaatccccccaaaacgcgcgcatttggtcgctttacccacgcaggcagctacaccaccacgattactcgccctactctctttcgttcgtatcttaatgaacaacttacgttgctgtatcaggattatggtgcgcatatctcagtgcaaccctcgcagcatgaaatcccttatccttatgtcatcgatggctctgaattgacacttgatcgctcaatgagcgctgggttaactcgctacttcccgacaacagaactggcgcaaattggcgatgaaactgcagacggcatttatcatccaactgaattctccccgctatcgcattttgatgcgcgccgcgtcgatttttccctcgcacggttgcgccattataccggtacgccagttgaacattttcagccgttcgtcttgtttaccaactacacacgttatgtggatgaattcgttcgttggggatgcagccagatcctcgatcctgatagtccctacattgccctttcttgtgctggcgggaactggatcaccgccgaaaccgaagcgccagaagaagccatttccgaccttgcatggaaaaaacatcagatgccagcatggcatttaattaccgccgatggtcagggtattactctggtgaatattggcgtgggaccgtcaaatgctaaaaccatctgcgatcatctggcagtgctacgcccggatgtctggttgatgattggtcactgtggcggattacgtgaaagtcaggccattggcgattatgtacttgcacacgcttatttacgcgatgaccacgttcttgatgcggttctgccgcccgatattcctattccgagcattgctgaagtgcaacgtgcgctttatgacgccaccaagctggtgagcggcaggcccggtgaggaagtcaaacagcggctacgtactggtactgtggtaaccacagatgacaggaactgggaattacgttactcagcttctgcacttcgttttaacttaagccgggccgtagcaattgatatggaaagtgcaaccattgccgcgcaaggatatcgtttccgcgtgccatacgggacactactgtgtgtttcagataaaccgttgcatggcgagattaaacttcccggccaggctaaccgtttttatgaaggcgctatttccgaacatctgcaaattggcattcgggcgatcgatttgctgcgcgcagaaggcgaccgactgcattcgcgtaaattacgaacctttaatgagccgccgttccgataataagttctgaaccttcttatcagaaatagatgtgaaggagtaagtaagacacctggcaaatagcctgcaataatcgtgggctgtttgcttccttgggcggatacgagttttattatcgtcttaatgatttccacatattaaaagcaagtatgctttcaaaacacaattataaaaaatcccgccaacaatataagtttttataaaattaaatataagattatggctttagaatatttttatttctaatagacgagatttttcctgttatgatataatatgctgaattaacacatgttaacgatttaccagtaatgtaaataaattttcgaggagatcattccagtgggacgtaaatgggccaatattgttgctaaaaaaacggctaaagacggtgcaacgtctaaaatttatgcaaaattcggtgtagaaatctatgctgctgctaaacaaggtgaacccgatccagaattaaacacatctttaaaattcgttattgaacgtgcaaagcaggcacaagttccaaagcacgttattgataaagcaattgataaagccaaaggcggcggagatgaaacgttcgtgcagggacgttatgaaggctttggtcctaatggctcaatgattatcgccgagacattgacttcaaatgttaaccgtacgattgctaacgttcgcacaattttcaataaaaaaggcggcaatatcggagcggcaggttctgtcagctatatgtttgacaatacgggtgtgattgtatttaaagggacagaccctgaccatatttttgaaattttacttgaagctgaagttgatgttcgtgatgtgactgaagaagaaggtaacattgttatttatactgaacctactgaccttcataaaggaatcgcggctctaaaagcagctggaatcactgagttctcaacaacagaattagaaatgattgctcaatctgaagttgagctttccccagaagatttagaaatctttgaagggcttgttgatgcccttgaagatgacgacgatgtacaaaaagtttatcataacgtcgcaaatctctaattatcttttaaagaaatctgtctttacggcagatttctttaatctcatataattcttataaaaaatataatattcaactcgtcatattgattatacccccccgttcccagagaaataatatttattaaaattccagttcttctttttctgattacagaaggcaaagtggcaattacgcatagtttcccgataaagacgcgatagcgacatcccgcataaggcatttttctctttatctttgtacggtacttcatggaacagagtttttgaccttgcgaatcgtgatgtctgttggggagggacaatttgctcactgaagcgtgagactcgattaagcgcacgaaacacagaaatcaaaaaacccggtcacttttttacaaggtaaccgggtaaaaataatttttattttttaactgttttgagactcatagagatgtctcaaaactaaaatttggctcctctgactggactcgaaccagtgacatacggattaacagtccgccgttctaccgactgaactacagaggaatcgtgagaacgaggcgaatattagcgatgcccacccacaatgtcaaagcctgttttttaaatttgaaatcgtttgctgaaataatctgcattttgtcgtttattccgacacaactggctttttttcacacttttgcggctcgggtcgagggtatttccatagccaacgtccagtaaccattcgccagtaaaacagcacggcccgcacagcccagtcggcaaacattcccatccagacaccaaccacaccccagccaagcatgattcccagcacataaccgactacaacccgacaaccccacatgctcaacatcgaaacccacatggcgtaacgggcatcacgagcacctttaaatccagcgggtagcacccatgaggcggaccaaataggcataaataaagcatttagccaaatcagaatcacaacgacatgtttaacctgtggatcctgggtgtaaaacgatgccataaccccggcaaagggagccgttagccaggcgatggccgttaatccaagagtggaaagccagaacacatgccgcaactgaatctctgcttgcgctatctgccctacccccaaccttcggcctgtaatgatcgtagaagcagagccgagcgcacttccgggtaagttgataagagccgcaattgaaaacgcgataaaatttccggcaataacactggtccccatcccggcaacgaacatttgggttaataaccgaccactggtaaataacactgattcgacactcgcgggaataccaatccccatgacttcccagataatgctaaaattcagcggtttaaaatagctctttaacgaaatccttagcgcaggattaaaaccaatcgccagcacccacaaaattgcaactgcgccaatataacgagaaatggttaaacccagccctgccccgacaaatcccagtcccggccaggagaaaaggccgtaaatcaatatgccgctaataataatattaagaatattcaggctaccgttaatcaatagcggtattttcgtattccctgcaccacgaagtgccccgctaccaataagagtgatggcagctgctggataactgagtaccgtcagctccagataagtcaacgccagtgctttaacttctgtcgtggcatcacccgcgacgaaatcaataatttgttcgccaaaatgatgaataagcgttgccaacagtacggcaaacaacgtcatgatcaccaatgactgccgcgtcgccaccctcgctcgtcgtcgatcccgcttaccgagactaaatgccacaacgacagtagtaccaagatcgatagcagcaaaaaaagccataatgaccatattgaagctgtccgccaatcccacgccggccatcgcatcttttcccagccagctgaccagaaaagtgctcagaacccccatcaacaggacacaggcattctccatgaagataggaacagcaagcggggttatctcgcgccagaacaacactttgtagctcttgcgtttagcgtgccagcgagtgccgtgaacaacctggcgtaaagcagaggagatattcaaagccgaccttaattgcagaaagtgaaaccacatttcaaataatgagggagaatcagcaaagctgcaaagattttcgccaacaaattgtctgcaaatgcaacaaactgttgatagaaacggcaaacagttggggaatttaaaaatcgggtttgacaaaagatttttcgccgttaagatgtgcctcaacaacgattcctctgtagttcagtcggtagaacggcggactgttaatccgtatgtcactggttcgagtccagtcagaggagccaaattcctgaaaagcccgcttttatagcgggatttttgctatatctgataatcaatttcctcttcactgctttccatcacctgccgcttgatatcctcaactgacagtcctgcattacaaagttccagaaagcgccagacatagttacgctgaagttgtcctcgcttcagtcccaaccagacagtattagcatcaaaaagatgccgcgtatccaggcggattaaattctcttcctcttgttcgccactggattgctcggcaactaatccgatcccaagcccaagagcaacataggttttaatgacatcagaatcctgcgcacttaatacaatatctgccagcaaacctttgcgggcaaatgcgtcatcaatacgtgagcgccccgtaatcccctgtcggtaagtgattaacggccacttcgctattgattccagcgtcaatggtgaaatttgcgtcaagggatgatcgtgtggaacaagcaaactatggtgccaacgaaaccacgggaaggcgacgagctgcgggtcattactcaaacgctcgctggcgataccaatatcagcttcgccattttgcaacaatgtcgcaatttcctgtggcgtcccctggattagctcgagccgaacctccgggaaaagttcgcgaaaagctttaatgacctctggcaagctataacgtgcctgagtatgcgtcgttgcaatagtgagaacgccagacgtatcgttggtaaacaggtctgcaagccgacgaacattactggcttcattcagaatacgttctgcaatgaccagtaatgctttgcccggttcagtcatgcccagcagtcgcttacctcgtcgaacaaatatttcgatgccaagttcatcctccagttcccgaatatgacggctgacgcctgactgtgaggtaaaaagcatattcgcaacctctgtcaggttgtaatcctgacgtgcagcctcgcggattatctttagttgttggaaattcacggtaaactccgggcagttcagatttcccgttattgttaaagtctaatgcccggcataacaaataataaaaacccgcatcttattccatcccgatataacacttagctcaccaattgccactgccttttttccatcactggagaactaatcactgacattaacaactctttcactgcctgtgcctgtggcgataagttcgctctggcgggtaaatttaatgacaaagagagactcatggaaggagtggtaatgcgtgacatccacccatttactgcgccacataacgaacgcgcggccgattcgggtaatactgcaacgcccatgccgctggcaatcgctgcggtaagcgtggcaatagactcaatttcaccaataacttttgccgtgagtcgccgtagggaaaaagcctcatcaacacgaagtctaatagcactgtaatcactggggagaaagaggttcatttgcgcaatagcattcacatcaacgctttgccccgggcaatcttgagttcctaccagaaaaagatcttctttcagcaaagcctgactggatacaccagccacaggggaatgctcataaatcaccgccatatcgagttggtgatttatcaatttttcgttaagcactgcaccactattttcatgaagatagataacgatctccggaaattcagcgcgaaccgcctgtaataagggcatggtgatggatgacgcagcggttcctggtgcaaagccaatcgagacttgccccgataatgcctgaccaacgttatgcaccgccagttgggcctgttcacactgacgtaaaatggcccgcgcatgggtatagagaatttttccggcgtctgttggtgtaacgccccgctttgtacggatcaaaagttgttgatttaactcaccttccagtgtggcaacctgctggctgagcgctggttgtgcgatatgcaatacttcagcagcctgggtcaggctaccaatatctacaatttttacgaagtatttcaggcgtctgaagttcatgttgcctccggtttttaagaatcggcccaagtgccgccattacttacaaccagattgcaagatgcttgccagttttattttggtgttgatgtacaagctaaccaactgtcaaataagagattatgatagattcgtcatttgctcctttaatcagctgtcgcgttcccctgccctataaaaggagggtatgcaccacgatggttcattacccaataagattgaaagctcaccactttgttgaaattgacagcaaacaaacaaaaaaatgcatttcaccctttgacatcaccatgcactgccattaatatgcgccccgttcacacgattcctctgtagttcagtcggtagaacggcggactgttaatccgtatgtcactggttcgagtccagtcagaggagccaaattcaaaaaagcctgctttctagcaggctttttgctttctaattaccaacgctcttaaaacatctgtcttgaaccagaactaatttgcacaggcattcccgatcgacgttgcaacgcagcatttgcgcgatttacatcaacttcttgcccgttgataaacgcccgcaaagatggggttaccggcaatggcacttttcggtcagactcatattctgcacgattgcgcgacaatggctcatgaacttccagccagttcgagccatctggttcagtggtgtattttactggctggtcgataatttgcacacgcgtcccaacaggaacattatcaaacagatatttgatatcgtcattgcgcagacgaatacagccctgacttacccggagcccaataccaaaattggcattggtaccatggatggcatacaacctgccaatataaatcgcgtacagccccatgggattatcggggcccgcaggaacaaatgcgggcaaactctcccctcgtttcgcatattcgcgccgagtgttcggcgttggcgtccaggttggagcttcttgtttacgttcaacggtagtcacccagttacgcggggtttctcgcccagcctggccgataccaataggaaagacttccacagtattactgtctggtgggtagtaataaagacgcatctcagcgacgttaacaacaatccctttacgaacagtgtcgggcaaaatcagttgctgcggaatggtgagttgcgagccagacttcggcaaaaaaacatcagcgcccgggttcgcttccagcatgttacttaacccttgcccgtattgtgcggcaaaagtctccagcggctgggtattgtgatcaggaacagttacagtaaacgactgccccactaaacggctaccctctggaggtaatggataagttaccgccaggctagtatggctggcaaaaagcagagcaaatgagcaaagaatatttacacgacgcatcatgtccctttcctatgtcgcgaaagctatccgttaagtatagcttttatcagacttttcgtttttaactgttcaaatcagaagtcgtattccccggtagaacaatattactggcagcaagttcgcccatgttgttgtatatcgcacaggcagcttcgatgatgggcatcgccagagctgcgccactcccctcacctaaacgcatctccatattgagataaggctccagccccaaatgcgagagcgctatacgcgcgcctttttctgccgacaggtgagaaggaatgagatacggtttgatcgcaggagacatctggcaggctgcgagcgcagcagcataagaaagaaatccatccagcaacacgggtaaaccgcaggaagcagcacctaacatcactccagctattccgaccaaatcaaatccacccacttttgccaggacatcaacaccatcctgaggatttggttgattcaacgtaatcgcccgacgcacaacatcaattttattagccagtttatctgtcggcaggtttgcgccaatcccaaccacttcttcaggatcccggccagtgattgtgctgactattgctgctgccggtgtcgtgtttgccatccccagttcacctacaccaaacagcgtgacaccgttttttgccagctcctgcgtataacatatgacgtccaaaagcaacttttcagcctgacggcgactcattgccggagctgaagcaatattgccgctacctcgtgcgacacgcatgttgataagcccggggataggctcagcagtatcaataccaacatcaattacgtggacgttagcgcccgcttgttctgccagcacacacacgccggttgttccacgggtcatattttcagcctgtatggctgtcacttcttttggagaaatagcgaccccttcctcccagacgccgtgatcggcacacataaccagtaccgcttttttgcccacatgcggtatgccattcaaccccggcattcctgccagttgtatggcaagcacctccagctttcccaggctaccaacaggtttgagtaacccgtcaatatgccgttgtgcacgcgacatagcggtagaatcgatggctgggatcgtattcagtaaatcggcaagtatttgcatctcacgtctctttatagcagtgccagcaggaagaccagttcaccaagctctatggctgctcccagcgtatcgcccgtttgcccgcccagcgtacgtttgagaagctgaccgaggatgaaaatcgccaccatcgtcaccaccatagcagccacaccatgcatacccggcaataatacggcagcaaaaatagcggctaagccgagtgtgacgcaggtttgtcgcccatcaattttgccaatgaacacattgccaagcccttcttcccgcgcataacgatgacgatacatcaataatgcggcagtcccgcggctgaccgcacatgctgccgccagcgatgcaaggatcgattcgccacgcagagccaactcgcttaacaccagaatctttgccagtaccacaaaaatcaatgccagaccgccgtgggtgcctaaacggctatcacgcatgatttccaacatgcgatcgcggctacgtgcagaaaatacgccatcacaggtatcagcgaggccgtccagatggaatcccccggtcatcagcaccagcacaagtacgctaaacagtgccgccagtggtgcgccacaccatgcctgcagcaccatgaagaccagcccgctaatcgcgccaagcaataatccaatcaaaggaaaagtaataataccgcgagaataatgctcgaaatccagtccctgggaccagcgacgcggtacaggcagacgcgtaataaatgagagcatcgcccaaaataatttactcatttgatttttactccaatacccgaaaccaccagccatacttcatttgccgcagcggccaactgctgatttacccgcccggcaatatcacgaaaatgtcgtgccagacgactctccggcacaatccccattcccacttcgttagtcactaatacaacctttgcggggcaacgttggcaggcagcaatcaacgactgaatctcagcattaatcgcctgttccatcgcctgataatcccattcatcagggtctttatcgccgccataatcaaacaacagattagtcaccattgtggtaacgcattcaagcaacacaacctcattcgggttaatgtctgcatgaattaattcatcaagatgttgccagcgctccactgtgcgccagtgctccgggcggccttgccgatgatgttctatccgtgcagccatctcatcatcaaggatttgcgaggtagcgatatacagaacctgtgaagagtccccaataagcgcctctgcgtggcgactcttcccgctccgtgcgccccccgtcaccaaaatcatcataccgactcctgattcaaatgtatgatggtattcattgaacagaacaatggatcccccaccgttgctgaccgcaaaacatttacgcgattaatactgcgcgtaatataattaaaaatccagcattctcaatccattacgaaataagatggcattacggaatagccagactttctcgtgttaacgtccgacaaaatgcgtcattgacagcggtttctgtggattgacacatttcattcagataatgaattaatgctactgccggaacaaccagcaaacgggcattgtgttctgaaatccaggctattgattcaacgtcagcgacagatctgcgctgtaaaagaacttgtaaaacaacgtaatagaattatccggaatggtggcgactatgcactagggaaggtgcgaataagtggggaaattcttctcggctgactcagtcatttcatttcttcatgtttgagccgattttttctcccgtaaatgccttgaatcagcctatttagaccgtttcttcgccatttaaggcgttatccccagtttttagtgagatctctcccactgacgtatcatttggtccgcccgaaacaggttggccagcgtgaataacatcgccagttggttatcgtttttcagcaaccccttgtatctggctttcacgaagccgaactgtcgcttgatgatgcgaaatgggtgctccaccttggcccggatgctggctttcatgtattcgatgttgatggccgttttgttcttgcgtggatgctgtttcaaggttcttaccttgccggggcgctcggcgatcagccagtccacatccacctcggccagctcctcgcgctgtggcgccccttggtagccggcatcggctgagacaaattgctcctctccatgcagcagattacccagctgattgaggtcatgctcgttggccgcggtggtgactaggctgtgggtcaggccgctcttggcatcgacaccaatgtgggccttcatgccaaagtgccactgattgcctttcttggtctgatgcatctccggatcgcgttgctgctctttgttcttggtcgagctgggtgcctcaatgatggtggcatcgaccaaggtgccttgagtcatcatgacgcctgcttcggccagccagcgattgatggtcttgaacaattggcgggccagttgatgctgctccagcaggtggcggaaattcatgatggtggtgcggtccggcaaggcgctatccagggataaccgggcaaacagacgcatggaggcgatttcgtacagagcatcttccatcgcgccatcgctcaggttgtaccaatgctgcatgcagtgaatgcgtagcatggtttccagcggataaggtcgccggccattaccagccttggggtaaaacggctcgatgacttccaccatgttttgccatggcagaatctgctccatgcgggacaagaaaatctcttttctggtctgacggcgcttactgctgaattcactgtcggcgaaggtaagttgatgactcatgatgaaccctgttccatggctccagatgacaaacatgatctcatatcagggacttgttcgcaccttccctagaacaccacaatttcgctctctcggtaaggcactgtcacagcattcaacagaatgtgacttgccagatttattagcgccaccagatgtttaaccgggtaaccacgacccagtcggggatatattccatcttctcgctgacatcatcaagaataaaaaggtttatcacactcagagcaacgttcttcagcaggcgggataattcttcaacatttagaagatgtgttattaaaggcatacaaactggacgtattgtattttcttttggtggttgacctaaggtagcagtttatcctgatgcgctgagatttctgtaatatctacgtcaacattctcctcgaatagaaaatgcagccccggcaagtgattcacattttttaacaaaacgttgttagcgtgccattttcagaagctctccaagaaagcgaattcttttctcaaattctgcattctcagacacagctttctactccatggtaatggcccaaatacgaagttgctcaggatcattagtggtgctgagaagttaaataaccatgcggagtaccactcgtcatcacgtatttatatatcatgaagctattgttgtgttttgtacatcagtagatatattctgatatactccttttgctagacataacctttcacctgcttgcaaagcttctgtgttctgacattgccaaattgttgcaattctgtatccagccttctttcagtcatagcttcgggccgcgataagactcactgatctgaccctgattcctcttgcagactttatagaccaattaaaatgcagtttctgcaggtcaacgtctgaccatcattgtcatcactctggccattagagtaaccttctgcattcatccttttgtaaaaagtttatattagtatcagcaattaaccggacctgatactgatatgagtcttaccgcatatacggtcaatttcagcaattaattacattatccacgccaaagtatttgtcatcacaatgatggtaccttctttcagacaccattttttcaactccgttttccacggaccgcactcttatgtcaagagtgcggtccgtggatacaaccagagaccgactgacacgagtcagaggaaacgacggatatgttcagtcgtaaaatatctatcaaaaaacatgattaaggtcaaaaatgtttgatatttacaatttatgaagatgacaataattatagatatatgagaacataaatgaaaataattatcattacagtaatcatttgtactttgtattaatgagggatgaaatgttatataatataccttgtcgaatttatatcctttccactctgtcattatgcatttctgggatagtttctactgcaaccgcaacttcttcagaaacaaaaatcagcaacgaagagacgctcgtcgtgaccacgaatcgttcggcaagcaacctttgggaaagcccggcgactatacaggttattgaccaacaaacattgcagaactccaccaatgcctccatagccgataatttgcaggacatccccggagtagagataacagacaactccttggcaggccgtaaacaaatccgcattcgtggctggatttgcccctatatttccagacatctgttatcacttaacccattacaagcccgctgccgcagatattcccgtggcgagcgataacccagcgcactatgcggatgccattcgttataatgctcgaacgcctctgcaaggttctttgctgccgttaacccgtctggtttgggcatgatactgatgtagtcacgctttatcgttttcacgaagctctctgctattccgttactctccggactccgcaccgccgtgttcttcggttcaagtcccaacatccgggcgaactggcgtgtttcattagcccggtagcatgaaccattatccgtcagccactccactggagacgacggaagatcgttgccgaagcggcgttccaccgctcccagcatgacgtcctgtactgtttcactgttgaagccgccggtagtgaccgcccagtgcagtgcctcacgatcacagcagtccagcgcgaacgtgacacgcagtctctctccgttatcacagcagaactcgaacccgtcagagcaccatcgctgattgctttctttcacggccactctgcctgtatgtgcccgtttcgatggcggtacagcaggttttcgctcaagcaacagcgcattctggcgcatgatccggtaaacacgtttggcattgatcgcaggcataccatcaagttctgcctgtctgcgaagcagcgcccatacccgacgataaccatacgttggcagctctccgataacatggtgtatacggagaagcacatccgtatcatcagtgtgacgactgcggcggccatccatccagtcatcggttcgtctgagaatgacgtgcaactgcgcacgcgacacccggagacaacggctgactaagcttactccccatccccgggcaataagggcgcgtgcgctatccacttttttgcccgtccatattcaacggcttctttgaggagttcattttccatcgttttcttgccgagcaggcgctggagttctttaatctgcttcatggcggcagcaagttcagaggcaggaacaacctgttctccggcggcgacagcagtaagacttccttcctggtattgcttacgccagagaaataactggctggctgctacaccatgttgccgggcaacgagggagaccgtcatccccggttcaaagctctgctgaacaattgcgatcttttcctgtgtggtacgccgtctgcgtttctccggccctaagacatcaatcatctgttctccaatgactagtctaaaaactagtattaagactatcacttatttaagtgatattggttgtctggagattcagggggccagtctagtggcgaagcatcctcccgtgttttaattctcattgatggtcaggaggtaacttatcagcgcgccggagataattatggtgtgggactgttgatagatgagtctgcgctggagcgtgttgaggtagtgaaaggtccatattccgtactgtacggttcacaggcaattggcggtattgttaacttcatcaccaaaaagggtgaatctccggactccctatatcacttaaattgatacaactttttagagtagtcattagtgaacagataattgataactcagaaccagtaaaatgcaaaagacgcaccacgctgggaaaatcgctgctattcagcagagttttgtatcgagaatggtggccagccacttattgctctcgcgtaagcgggtaccgtgacattctgcctgaacttgacctggtactgtggctgattaaagccgatgaccgtgccctgtctgtggatgagtatttctggcgacacatcctgcagtgcggacatcagcaggtgctgtttgtggtgacgcaggccgacaaaacggagccctgccatgaatgggatatggccggtattcagccttctcctgcacaggcacagaatattcgcgaaaaaacggaggcggtattccgtctgttccggcccgtacatccggttgtggccgtatcggcccgcaccggctgggaactggatacgctggtcagtgcgctcatgacagcgcttcccgaccatgccgccagtcccctgatgacccgactgcaggacgagctgcgcacggaatctgtccggtctcaggcccgtgaacagtttaccggtgcggtggaccggatatttgacacggcggagagcgtctgtattgcctctgttgcacgcacggttctgcgtgccgtccgtgacacggtggtctctgttgcccgtgcggtatggaactggattttcttctgaacctgtcgtgactgatgccctccctgactctgagtctgctcacaaaagcactgttttcgttactgtctctcttgtccgtgcaatagctcaataatagaataaaacgatcaatatctattttatcgatcgtttatatcgatcgataagctaataataacctttgtcagtaacatgcacagatacgtacagaaagacattcagggaacaacagaaccacaattcagaaactcccacagccggacctccggcactgtaaccctttacctgccggtatccacgtttgtgggtaccggcttttttattcaccctcaatctaaggaaaagctgatgaaacgacatctgaatacctgctacaggctggtatggaatcacatgacgggcgctttcgtggttgcctccgaactggcccgcgcacggggtaaacgtggcggtgtggcggttgcactgtctcttgccgcagtcacgtcactcccggtgctggctgctgacatcgttgtgcacccgggagaaaccgtgaacggcggaacactggcaaatcatgacaaccagattgtcttcggtacgaccaacggaatgaccatcagtaccgggctggagtatgggccggataacgaggccaataccggcgggcaatgggtacaggatggcggaacagccaacaaaacgactgtcaccagtggtggtcttcagagagtgaaccccggtggaagtgtctcagacacggttatcagtgccggaggcggacagagccttcagggacgggctgtgaacaccacgctgaatggtggcgaacagtggatgcatgagggggcgatagccacaggaaccgtcattaatgataagggctggcaggtcgtcaagcccggtacagtggcaacggataccgttgttaataccggggcggaagggggaccggatgcagaaaacggtgataccgggcagtttgttcgcggggatgccgtacgcacaaccatcaataaaaacggtcgccagattgtgagagctgaaggaacggcaaataccactgtggtttatgccggcggcgaccagactgtacatggtcacgcactggataccacgctgaatgggggataccagtatgtgcacaacggcggtacagcgtctgacactgttgtgaacagtgacggctggcagattgtcaaaaacgggggtgtggccgggaataccaccgttaatcagaagggcagactgcaggtggacgccggtggtacagccacgaatgtcaccctgaagcagggcggcgcactggttaccagtacggctgcaaccgttaccggcataaaccgcctgggagcattctctgttgtggagggtaaagctgataatgtcgtactggaaaatggcggacgcctggatgtgctgaccggacacacagccactaatacccgcgtggatgatggcggaacgctggatgtccgcaacggtggcaccgccaccaccgtatccatgggaaatggcggtgtactgctggccgattccggtgccgctgtcagtggtacccggagcgacggaaaggcattcagtatcggaggcggtcaggcggatgccctgatgctggaaaaaggcagttcattcacgctgaacgccggtgatacggccacggataccacggtaaatggcggactgttcaccgccaggggcggcacactggcgggcaccaccacgctgaataacggcgccatacttaccctttccgggaagacggtgaacaacgataccctgaccatccgtgaaggcgatgcactcctgcagggaggctctctcaccggtaacggcagcgtggaaaaatcaggaagtggcacactcactgtcagcaacaccacactcacccagaaagccgtcaacctgaatgaaggcacgctgacgctgaacgacagtaccgtcaccacggatgtcattgctcagcgcggtacagccctgaagctgaccggcagcactgtgctgaacggtgccattgaccccacgaatgtcactctcgcctccggtgccacctggaatatccccgataacgccacggtgcagtcggtggtggatgacctcagccatgccggacagattcatttcacctccacccgcacagggaagttcgtaccggcaaccctgaaagtgaaaaacctgaacggacagaatggcaccatcagcctgcgtgtacgcccggatatggcacagaacaatgctgacagactggtcattgacggcggcagggcaaccggaaaaaccatcctgaacctggtgaacgccggcaacagtgcgtcggggctggcgaccagcggtaagggtattcaggtggtggaagccattaacggtgccaccacggaggaaggggcctttgtccaggggaacaggctgcaggccggtgcctttaactactccctcaaccgggacagtgatgagagctggtatctgcgcagtgaaaatgcttatcgtgcagaagtccccctgtatgcctccatgctgacacaggcaatggactatgaccggattgtggcaggctcccgcagccatcagaccggtgtaaatggtgaaaacaacagcgtccgtctcagcattcagggcggtcatctcggtcacgataacaatggcggtattgcccgtggggccacgccggaaagcagcggcagctatggattcgtccgtctggagggtgacctgatgagaacagaggttgccggtatgtctgtgaccgcgggggtatatggtgctgctggccattcttccgttgatgttaaggatgatgacggctcccgtgccggcacggtccgggatgatgccggcagcctgggcggatacctgaatctggtacacacgtcctccggcctgtgggctgacattgtggcacagggaacccgccacagcatgaaagcgtcatcggacaataacgacttccgcgcccggggctggggctggctgggctcactggaaaccggtctgcccttcagtatcactgacaacctgatgctggagccacaactgcagtatacctggcagggactttccctggatgacggtaaggacaacgccggttatgtgaagttcgggcatggcagtgcacaacatgtgcgtgccggtttccgtctgggcagccacaacgatatgacctttggcgaaggcacctcatcccgtgcccccctgcgtgacagtgcaaaacacagtgtgagtgaattaccggtgaactggtgggtacagccttctgttatccgcaccttcagctcccggggagatatgcgtgtggggacttccactgcaggcagcgggatgacgttctctccctcacagaatggcacatcactggacctgcaggccggactggaagcccgtgtccgggaaaatatcaccctgggcgttcaggccggttatgcccacagcgtcagcggcagcagcgctgaagggtataacggtcaggccacactgaatgtgaccttctgacagaaccatcgcctctctgtggtcccggtcatcatgaccgggacccggaccggcgcaacggatcttcaacgccacattcgctggcattaacaataacatgatattcatcacggagtgactatgttacagatagtcggcgcgctgatcctgctgatcgcaggatttgccattcttcgccttttgttcagagcattaatcagcacggcttctgcgctggcagggctcatattgctgtgtctgttcggcccggccttactggctggctatatcaccgaacgcataacccggttgttccatattcgctggctggcaggcgtatttctgacgattgccggaatgatcatcagcttcatgtggggacttgatggtaaacatatcgcgctggaggctcacacctttgactctgtgaaatttattctgaccaccgctctcgccggtggtctgctggctgttcccctgcagatcaaaaacattcagcagaacgggatcacaccagaagatatcagcaaggaaattaacgggtattactgctgtttttatactgcctttttccttatggcgtgttctgcatgcgcaccattgatcgcgttacagtacgatatttcaccgtcactgatgtggtggggcgggttgttgtactggctggctgcattagtgacgctgctatgggcggccagccagatccaggcgctgaaaaaactgacctgtgccatcagccagacactggaagaacaaccggtgctcaacagtaaatcgtggctgaccagtttgcaaaacgattacagccttcctgactcactgacggagcgcatctggctgacgctcatttctcaacggatttcccggggagagctgagggaatttgaactggcagacggaaactggttactgaacaatgcctggtatgaaagaaacatggcagggtttaacgaacagttgaaagagaacctgtcattcacacctgatgaactgaaaacgctcttccggaaccgcctgaatttatcaccggaagcgaatgacgattttctcgatcgttgcctggacggcggtgactggtatcccttttcagaaggtcgccgttttgtatcattccatcacgtggatgagcttcgtatctgtgcctcctgcgggctgacagaagtacatcatgccccggaaaatcataagccggatccggaatggtactgctcctctctttgtcgcgaaacagaaacactgtgtcaggaaatttatgaacgcccttacaacagctttatttccgatgcaacggcgaatggtctgattctcatgaaactgccggaaacctggagtacaaatgagaaaatgtttgcttccggagggcagggacatgggtttgccgctgaacggggaaaccatattgtcgacagagtccgtctgaaaaacgcacggatcctcggtgataataatgccagaaatggagcagacagactggtcagcggaacagaaatccagacgaaatattgttcaactgcagcccgtagcgtcggtgcggcattcgacggacaaaacggacagtatcgttacatgggaaataatggccccatgcaactggaagtcccccgtgatcagtatgccggcgctgttgaaaccatgaggaataagatccgcgaaggtaaagtagaggagagatgacgcccggcgagcgcagcctcattcaacgggccctgaaaaccctggaccgccatcttcatgaacccggcgtggccttcacctccacccgtgcagcacgggaatggctgattctgaacatggcgggactggagcgtgaagaattccgggtgctgtatctgaacaaccagaatcagctgattgccggtgaaaccctcttcaccggcaccatcaaccgcacggaagtccatccccgggaagtgattaaacgcgccctgtaccacaatgccgctgccgtggtactggcacacaatcacccgtccggtgaagtcacacccagtaaggcagaccggcttatcaccgaacgtctggtacaggcactgggcctggtggatatccgggtgccggaccatctgatagtcggtggcaaccaggttttctcctttgccgaacatggtctgctttaacccttcacaaccacatcacacctgttttcacttttatcttctgtcttcagaggtatcccattatgaaaattatcacccgtggtgaagccatgcgtattcaccaacaacatccgacatcccgtctttttccgttctgtaccggtaaataccgctggcacggcagtgctgaagcgtataccggtcgtgaagtgcaggatattcccggtgtgctggccgtgtttgctgaacgccgtaaggacagttttggtccgtatgtccggctgatgagcgtcaccctgaactgagtgggaattctgatgagcagaattatcgccactaccggaccattcttagccgattttctgtaaggattttatcgtgtcagacacactccccgggacaacacttcccgacgacaatcacgaccgcccctggtgggggctgccctgcaccgtgacgccctgtttcggggcacgtctggtgcaggagggtaaccggttgcattaccttgccgaccgcgccggtatcagaggcctgttcagcgatgcagatgcgtaccacctggaccaggcctttccgctgctgatgaaacaactggaactcatgctcaccagcggtgaactgaatccccgccatcagcataccgtcacgctgtatgcaaaagggctgacctgcaaagccgataccctcagcagttgtgattacgtttatctggctgtttatccgacgcccgaaatgaaaaattaactctccagaatagccttctgctacggcctggtgttttcaccacgccacttttccatttttatatctgcatatcaggaaaatcttcagtatgaaaacattacctgtattacccgggcaggcggccagttctcgcccgtctcctgttgaaatctggcagatactgctgtcccgactgctggaccagcactatggcctcacactgaatgacacaccttttgccgatgaacgtgtgattgagcagcatattgaggcaggcatttcactgtgtgatgcggtgaactttctcgtggaaaaatacgcgctggtgcgtaccgaccagccgggattcagcgcctgtacccgctctcagttaataaacagcatcgatatcctccgggctcgcagggcgaccggcctgatgacccgcgacaattacagaacggtaaataacattaccctgggtaagtatccggaggcgaaatgatgacactggaagccgacagcgttaacgtacaggcgctggatatggggcacattgtcgttgacattgatggtgttaatatcactgaactgattaataaggccgctgaaaacggttattcactccgcgtggtggatgaccgtgactctaccgaaacaccggcaacttatgccagccctcaccagttgctgtaagacaatgcagtgatacagggtatagtgccattaaccacagaaacagcactgttgtcctgtattaagcaggcaagagaagatgtccttaccctgcgccatctgcagcttctgcaccagaaccggtgaatctcactcaacaggcttcatttctcctgacgccagcctgaatacagctggcgttttcatttataaacagaaaggaaaaccgataataatggaatggacgccccgaccatgaagcaacggtaggatattactgataaaccttccagtggaggtgcgttatggccgttttaacgattagcattgacctgacaaaaaatgaattccaaatccacggtctgggtaggaacagaaaaatctaagctcagaaaacggattaaagtaagcgtcaacggagcaccgtattgacgcttatttattggtgagaactacgttccatggcaggagttcgtcaacacggttggagggccattccggcagtatgctcagaatatggcgcagatacgcttccggatcgataccgttcagacggcaggtgcctgcttttctggcaacaagcaggaatctcagcgctgaagcaggaattagaggtaaaaacgccctaccgggccatgaatcacccggtcattggagtagtaaccaaagcagatttagccagcatggaacaaatatctttggtgaaaagttggttacgggaagctggagcgcacaacgtgttagtaaccagtgcagttaataacaatggagttacagaactttttgccttgctgcatacagaagaaggctgttgttaatttcgattggttctcggatgagaatgatgacggtgatacacagataagaatcaatgagcaatgagggttgccgggcaaccctcattgaataaaacgggaattacttcgcttcgccgtttttcatttcgcccatagctttcagctttttggagatatcgcggcgttctttggagagctcggcatttttgatgatgtaatcgtcaacgcgatcttcatagtcacctttcatgctggcgatgatgccctggattgcttcaacgctcatccccggcttgatgtaatcgctcaggttgtccagcagcaggacgcgcttctggttgtcacggatctttttctcaacgtcctgaatttcacgttgcagtttgttcttacgacggaacagacgaacaaattccagtacgtcctggaatgaaggcttggtagtttccatttttatacccctgataatgtgagagtcggattcgtttaagcaaccgctattcgttagggccaacattactcatagctgccgcagatgacaatgcttttatcccttttcactatcataccctttatccttgctgaatcgaagcagcagcaagatgattctgaagttcaggaattatttgcgcaaggcccggcaaatcagattcgatagcaactcaagctgatgcgccgtttccatgttcagccacacataaccatagattggtgtttccacaaccttcaggtcatggtggttattgagcaactgacgcagctcttccacagcatcgttcaatttttccgtattggcaaaaaccggctgcggattaccttcgtacagcgcatgaacaaggctcagcagtatttgctgcatcatgtgctgggtatcacgaagtttttgcgcgttcaataacacgaaatggctggggcgcgtggcccagtatgcattgatttgcaactccagcatacaaaccagattgcggttaatggtctggataccttcatatatcgattttggaatacgggtttctttgctggcgggcgcaatcagtccacgcattttcacggcatcggtcaggagtttttgtagatggctttccagacgtgggcgttcgagtaagttcggtgagaatgcagattgatagacccgattatactcggtcagacttttcgccagttgaatgcgccagtggatgaacgcccgttgtggccagataccggtaaacaacattgccagtaaagagccgaggatcacatcgccgcttcgccataacgccgtatcaatttcacctgtcggggaacccacaacaattgccagcgtcaccccaatcaataaaccttgatacggtttcttgcccagcgccagccaaccgcaaaggaacatggccgccgcgcaccagactaacatcagcggtaacgagattaactccagttgcagagcgataagacctaaaatcgaacccaacaccgtaccgccaatacgctcaaaggcgcgagggacaacgttaccccagaacgagattggccccataatcaccaccatggtgaccagcggccaggtgctttccgggatagtaaacaggcggataatgagaaaagtgagcaggaatgccagcgcgacccgagtaccatgcacaatgcggtaatggcggtatacccggatttcaaacgggcttaatgacttatcggcacgcacgcagaaactccgtaatgagattaaaagcgctcataactcatctgtcggccagaaggcgcgcctctgaattatccgacggacaaaccgggaacagtgtaatttcccggcaggagcgaaaaaattgaaaggcgcatcttactcttttcgctttcaaaaaaaagagtggtcatcgcgttaacacaccgccctgagatgaattagtgatgttttggctgcaccgcaacatacatttcgatatcccagtacccatcttccgcgccattgttcaaataaacctcgaagcagggctttggtaacatttcataagcactgtcctgcaagagactattaaagaactgataccagggtttagcaaaatcatcaccgactacacgagctaccgccaccgcatactgaccacctgtaatttctgtcagaatgacgccctcactgttttcgggaagcgtaaagtaacccggcaccgtcacgacggtgtcgcagcgtaatttttcggcgggtgtttcatctggattgtcgtaatagacagcaacccactccttcggcacaatatttttgctatctacccacatcatcaactgctcaaagcctttctttaccgtctgttcccacgggccaacgagatggaaacctgcaacggtacgtttctcttcctgcttaatctcgtagttcatgacgcctccattgatactgtttttatatacagtatagttgcaaaattaaaaccacaaggaatgagtgttgattatgcgagcagactcgcactcctgccagtctgctgcaaaagaaaggtcaggccttatggtggaaataatcactcaggcgagaaaacatgctgccttccccgacagattccagggtaaccagcggccagtgcgccacctgtttatcacggtcgtaaagttcaatttcccctacccgctgatgggcgctaattggcgcggtgagttctttaccatcaagggtatatttggctttgatatgtggaatttcggctttcggtagcaccatccagaactcttgttccgttcccaggtcgatattttctttatcgccataccagatgcgttccgttccgacctttttcccacggtgcaaaatttgcaccgtagtaaagttttgttgcccccaacgcagtaattttcttgcctcttcctcacgaccttttgcactgtcagcccccattaccactgcaatgagacgacgctgcccatctacagccgaagcaatgagattaaacccggcaccagaagtatgacccgttttcaggccgtcaacattcatggttttatcccacaacaacccgttacggttttgctgggtgataccgttccaggtgagacttttctcactgtacatatgataaaactcgggctcgccgtggatgatagcacgagaaagcacagctaaatcataagccgagctatgctggccaggtgcatccagaccatgcactgtttcaaaatgcgtatccttgagatgcagcttctcggcatagttgttcatcatttcaacaaactgccgttgcccaccggcaatatagtcagccagagcaacacaagcgtcatttccggaatccacaattaaaccacggcttaaatcacgtaccgatacgcgatcgccctctttcaaaaacatcagtgaagaaccgacaaacaccggattatctttcgcccacgcatcgcgccccacggtgacaatatcgtctggcgtaatgcgatgactatcgatagcgcgatccacgacataacccgtcatcagctttgtcaggctggcgggattgcgctgttgatgctcattacccgcggtgaggatctgaccggtggtgtaatccatcaatacccaggacccggcatgaatctctggaggctgaggtgaaaaaggaatgttttccgccgcaaaaccagacgataagttaaaaacgaacaaagaagcagcaataataagacggcgtttcaacagcaaaccctcaggagtttcaaatagctgttctttttacggaaatacttatgaactggctggaataaagtgcaagaaaatgtgactaccctctcatttttatctgacatgatctgttgccactcgctgccaaattgtggcgctaaagctgattagcacggtgatatttgatactctggcagacagcagaaataacggatttaacctaatgatgaatgacggtaagcaacaatctacctttttgtttcacgattacgaaacctttggcacgcaccccgcgttagatcgccctgcacagttcgcagccattcgcaccgatagcgaattcaatgtcatcggcgaacccgaagtcttttactgcaagcccgctgatgactatttaccccagccaggagccgtattaattaccggtattaccccgcaggaagcacgggcgaaaggagaaaacgaagccgcgtttgccgcccgtattcactcgctttttaccgtaccgaagacctgtattctgggctacaacaatgtgcgtttcgacgacgaagtcacacgcaacattttttatcgtaatttctacgatccttacgcctggagctggcagcatgataactcgcgctgggatttactggatgttatgcgtgcctgttatgccctgcgcccggaaggaataaactggcctgaaaatgatgacggtctaccgagctttcgccttgagcatttaaccaaagcgaatggtattgaacatagcaacgcccacgatgcgatggctgatgtgtacgccactattgcgatggcaaagctggtaaaaacgcgtcagccacgcctgtttgattatctctttacccatcgtaataaacacaaactgatggcgttgattgatgttccgcagatgaaacccctggtgcacgtttccggaatgtttggagcatggcgcggcaataccagctgggtggcaccgctggcgtggcatcctgaaaatcgcaatgccgtaattatggtggatttggcaggagacatttcgccattactggaactggatagcgacacattgcgcgagcgtttatataccgcaaaaaccgatcttggcgataacgccgccgttccggttaagctggtgcatatcaataaatgtccggtgctggcccaggcgaatacgctacgcccggaagatgccgaccgactgggaattaatcgtcagcattgcctcgataacctgaaaattctgcgtgaaaatccgcaagtgcgcgaaaaagtggtggcgatattcgcggaagccgaaccgtttacgccttcagataacgtggatgcacagctttataacggctttttcagtgacgcagatcgtgcagcaatgaaaattgtgctggaaaccgagccgcgtaatttaccggcactggatatcacttttgttgataaacggattgaaaagctgttgttcaattatcgggcacgcaacttcccggggacgctggattatgccgagcagcaacgctggctggagcaccgtcgccaggtcttcacgccagagtttttgcagggttatgctgatgaattgcagatgctggtacaacaatatgccgatgacaaagagaaagtggcgctgttaaaagcactttggcagtacgcggaagagattgtctaatttgaagcctccgccgctggtacggcggaggacaatgttgagtcaggctttttgaacggtgatgctccacgctgcatcgccaatctgctgataatcggtgatggcatgtccttcttctgccgcccactgtgggattgcttcagttgcctgggtgcaatcaaactcaatcactaactcatcgccgctgaccatttctgccagagctgcttttgcttctatgagtggaaacggacagacctgcgtcaccacatccagctttttaatcaccatctttacaccttacttaatttgccgcagcagttgccagtcgcgccttacgctgcggtcgaacatacacaagccaggacgcagtccagactccgagaatcataaatacaaggccaatccagccctgccaggtcatcattgcagtcataaccagtccattaccgatagagcaaccacctgcaatactggcaccgaagcccatcagtacaccacctaacccgctacgtaatgttgtttgtgcatcagctgcgcgaacgcggaactcacggctcgctttggctgcaataaatgaccccacgaagatccctaacaccaggaaaacgccccagttaatgtatttcatgtcacccgcgaccagaaattgcagaatattggccgttggggaagtgattcctaacccaaacatgcgtccggttgcttcactcaggggccaggctaaaagcgcaatcaaaccgatgagtacagctgtgacaaagggatgccagcgtttttcaaacagaatatgagcgatcccggttcggcgcggcggtaaggtcgcgactttgagttttggcttcttcaactctttcatcaccacccagagcgttatcaccagcaaaacggcaaccaacggccacacagacaaattaaaagtctcagcaatagagttatgttcagtactgtagtgctgcaaggtttgatttaaaccactggcatgtggagaacgcatcaccgcactcatcaccatataagtgaaaagcgcgatccaactgccgatcaatccctcacccgcgcgataccaggtcccggtggcacatccacccgccagaacaattcccagcccgaagatatacccacctataacagtaccaagccacgggaacgccccggcttcgtaagtcagtaggcccgcctgaattaacgcaaaaacccccacgctttgtaccgaaattgcaatcagcaaggcgtaaaacatgcgattatttttcacgatatacatatcgcgaaaaccacctgtcaggcaaaaacgcccacgctgcatgacaaatcccagcagagcaccacaaattagcccgcttaatatcattgaaaacataaattaattaaccagatgaatgttaatgaggaaattattcatgactggtggaatgcagaccaataaccaaattctctaaattagaacaaatggttattaatgaggagttcgatacaaaagaataaaaaaaccggagccaaatgttcattcgactccggtttattattagaaaagatgattatgctacgtcttcgtactgcggaaccggattacggaagctcttggtgacgcaagccaggtaaatcagaccgatagcagcccagatcagacccagaaccattgagctttcttccaggttaacccacagcgcaccaacggtcagcgcaccacacatcggcaggaacagatactggaagtgatctttcagcgtcttgttacgcttctcacggatccagaactgcgagatgaccgacaggttaacgaaagtgaacgccaccagcgcaccaaagttaatcagcgccgttgccattaccaggtcgaagttgattgccagcagggcaatcgcgccaaccaggatgatgttcatcgccggagtacgccatttcgggtgtacataaccgaagaagcttttcgggaatacgccgtcacgacccattacgtacatcagacgcgctacgcctgcatgcgccgccataccggacgccagtacggtaatggtggagaagatcagcgcgccaacctggaacgctttacccgcaacgtacagcatgatttcaggctgtgacgcatccggatctttaaagcgagagatatccgggaagtacagctgcaggaagtaagttgcaaagatgaagatcatgccgccgatcagcgcggtcaggaaaatcgcacgcgggatcacgcgctctgcatctttggtttcttccgacaggttgctgatgccgtcaaagccggtaaaggagaagcacaggattgtcgccccggtaatcatcgggataacatgcgcatcgccagaccagaatggacgagtgctcgccagcgtaccagcgccttcaccttcaaatacgccataaacaaccatgcccagaatcaccgcgatcagcactacctgcaacacgacgattacagtgttgaagttcgctacggatttcagactacgcaggttaaaggcggtcataaaggccaccagcgccaccacaaacatccacgatgggatggaaggcaccagagcttcaaaatagattttcgccagtagaatgttgatcatcggcgcgaacagatagtcgagcagagaagaccaacccaccataaagccgacagtcgggctaatggatttctgggcgtaagtgtatgcagagccagcagaaggatagcggcgaaccagcttcccgtagctcagagccgtaaacaggatcgcaatcaatgcgaacgcataggctgtcggcacatgaccatccgtgaggcctgaaacgataccaaaagtatcaaacagcgtcatcggctgcatataggcaagacccatcattacaaccggaactaacgtaagcgttttacgcaattccacgcgagaggtgtttggagtaacgttatgcgacatggtcattctcctttacggtgataaccgtcgcgtaagcaaaaaattgccccatttttttggattcctcagcgacaacaactgtcgatttttagtaaatatctatccggtacgaagcccggcctcttggtatgaatgattggtttgaagcaaaaaataaccgacgctgatgaaacgtcggtttttagtcattttttgacagcggcgcattgtgcctaaatgggggggaaatgacaagagaatgagaggcttgtcagaataatttttctttaaatggctgattttccgtcatcagattttgcataaacaccggcgatcgcactatttgctaaaatttcatcccgccaccagccactggcaagtcctgcggtctgttcgttccagccaatccagacgggttcaaagagagtttgggcgaccactttcttctcgattaacgcgccactatcgagaaaacgttgcgccagataacggggtaaatagccgcagccgaggccgctaatttgcagctccagtttggttttaaaatcgaaaacggtaatggcttcttgttcgtcgagaagttgtgatgccgtagaagcgcctgcctgcgcagtatcccccaccacaatcgcccgatatcgcttaataatacgacgatttaacggctcttcttccagggctaacggatgatgaggcgcgaccgcaaagacttgttccagatcgcccaaccgtgaaaaaccaaactcactggaagatggtggctcatgcatcgcgccaacaataatatccgctcgcccctgagtcagggcatcccatgaaccaccgagtacgccattgataaacttcaggcgcgtcacgctatgatgttgataaaaagcttcaatgagtggcgcaagcagagaaaaaggaaacgtgtcgtccacgccaatcaccagctcgttttcccagccttcatgcagtttgatcgcctgcttttccagttcccgcacggtatgcagaacttcccgccctttctctaataacatttttccggtgcgggtgaatttagcgcggtgtccgctacgatcaagcaattgaatattaaggtcgctttccagcttgtgaacggtgtaactcagagcggacggcgtcttgtagagtttggccgacgccgccgcaaaactgccttctttttctaaggcatcgaggatcatcaacacatccagcagtggtttcatacacgcccccttgcagtgcatgcggcgtcctgctggcgtgatcgtttactccagcggcattaccagcggatcgggatactggtattcaaatcccagttcattacaaatccgactgccatcaataatcttacctttgccgctgtccagactatttctgaactgcggaggttccagccccagtaaacgggccatctgcggatagaaaacattacgcgcagggtgagctggcgcacatatattatagatgtgtccgcctttaggtgcctgtaacaacagagtgatagcgccaataacatcttctaaatggactaaattaacaccatgttcaccatcaggcgcggtttttccggcaaagaagcgtccgggatgacgtcccggtccgaccaggcccgcaagacgcagaatatcgaccgaagtaccgggtaaattgtgcagccagtcttcgagttcttctaatactcgtccactgttggttactggattacgcggggtggtttctttcaccgtgccttgcgcgtcgccatagacagatgttgagctggtaaaaataatgcggggaatacgatgggccagcgcgctatccactaactcttgtaccgcttgtaaatagaactcatcgccggggccgctacgacgtgccggaagcgtaatgaccagcgcatcggcatccatcagggcatccagatcgtcagaatcgcaaactagctcaggctccatgcgaagcagatagctatcaatgccactcattcgggccgcttcgacaccatcttgtgtggttttactcccggtgacttgccagcctcgcgctgaaagtgacatcgccagcggcatgcctaaccaccctaacccgacaattgcgacctttttcatccgttatctcctgatacaccttagatctataaggctacgctagcgtatcaaaactgacaattcattctatgaatgaatctgttcaataatgataacgacatgctgcaatgagcagtgaatcgtcggtaaccgcgtataccagacggtgctcctctgtaatgcgtcgggaccagaaacctgacaaattatgtttcaggggttctggcttccccttaccttcaaatggcgttctgcgggtatctttgataagttcattgatctttttaacaattcgcttatctgtttcctgccagtacagataatcgtcccatgattcctcagaccagattagtttcactcaatgatgtccttttccgttcctttgcctgatttcaggctatcgattgagtccatcaatctccgggcgttagcgggggagcgcagtagataagccgtctcttccagcgagttgtattcttcgagtgacatcagaacacaagcctctccattctgacgagtaataaggatcggggcatgatcttcaacggctttcatcattgttgccgacaaattctgacgcgcttcgctgtagctaattgtacgcatgtcaatctcctcttttgtacagttcattgtacaatgatgagcgttaattaactatttattaattagtttgtagatcaaggtattgtcagtgagacgaaaatccaggcttcgctatttttggtgccatcagctaagaggacagtcctcttagccccctcctttccccgctcattcattaaacaaatccattgccataaaatatataaaaaagcccttgctttctaacgtgaaagtggtttaggttaaaagacatcagttgaataaacattcacagagacttttatgacacgcgttcaatttaaacaccaccatcatcaccatcatcctgactagtctttcaggcgatgtgtgctggaagacattcagatcttccagtggtgcatgaacgcatgagaaagcccccggaagatcaccttccgggggcttttttattgcgcggttgataacggttcagacaggtttaaagaggaataacaaaatgacagacaacactcgtttacgcatagctatgcagaaatccggccgtttaagtgatgactcacgcgaattgctggcgcgctgtggcattaaaattaatcttcacacccagcgcctgatcgcgatggcagaaaacatgccgattgatattctgcgcgtgcgtgacgacgacattcccggtctggtaatggatggcgtggtagaccttgggattatcggcgaaaacgtgctggaagaagagctgcttaaccgccgcgcccagggtgaagatccacgctactttaccctgcgtcgtctggatttcggcggctgtcgtctttcgctggcaacgccggttgatgaagcctgggacggtccgctctccttaaacggtaaacgtatcgccacctcttatcctcacctgctcaagcgttatctcgaccagaaaggcatctcttttaaatcctgcttactgaacggttctgttgaagtcgccccgcgtgccggactggcggatgcgatttgcgatctggtttccaccggtgccacgctggaagctaacggcctgcgcgaagtcgaagttatctatcgctcgaaagcctgcctgattcaacgcgatggcgaaatggaagaatccaaacagcaactgatcgacaaactgctgacccgtattcagggtgtgatccaggcgcgcgaatcaaaatacatcatgatgcacgcaccgaccgaacgtctggatgaagtcatcgccctgctgccaggtgccgaacgcccaactattctgccgctggcgggtgaccaacagcgcgtagcgatgcacatggtcagcagcgaaaccctgttctgggaaaccatggaaaaactgaaagcgctgggtgccagttcaattctggtcctgccgattgagaagatgatggagtgatcgccatgagctttaacacaatcattgactggaatagctgtactgcggagcaacaacgccagctgttaatgcgcccggcgatttccgcctctgaaagcattacccgcactgttaacgatattctcgataacgtgaaagcacgcggcgatgaggccctgcgggaatacagcgcgaagtttgataaaaccacggttaccgcgctgaaggtgtctgcagaggagatcgccgccgccagcgaacgcctgagcgacgagctaaaacaggcgatggcggtggcagtaaagaatattgaaaccttccacactgcgcaaaaactgccgccggtagatgtagaaacgcagccaggcgtgcgttgccagcaggtcacgcgtccggtagcttcagttgggttgtatattcctggcggctccgccccgctcttctcaacggtattaatgctggcgactccggcgagtattgcgggctgtaaaaaagtggtgctgtgctcaccgccgccgattgccgatgagatcctttatgcggcgcagctgtgcggtgtgcaggacgtgtttaacgtcggcggcgcacaggccattgccgcactggcgtttggtacggaatctgtgccaaaagtggacaaaatcttcgggccgggtaacgcctttgtcaccgaagcgaaacgtcaggtgagccagcgtctggacggtgcggcgatcgatatgcccgcaggcccgtcggaagtgctggtgattgctgacagcggcgctacgccggatttcgtggcttctgatttgctctctcaggctgaacacggcccggactcacaggtgattttactgacgcccgctgctgatatggcgcgtcgcgttgccgaggccgtcgaacgccaactggcagaactgccgcgtgccgaaaccgcccgccaggcactgaacgccagccgcctgatcgtgactaaagatttagcgcagtgcgtggagatctccaaccagtacggcccggagcacctgatcattcagacccgcaacgcccgtgaactggtcgatagcatcaccagcgccggttcggtatttcttggtgactggtcaccggaatcggcaggtgattacgcctccggcaccaaccacgttctaccgacttacggttacaccgccacctgttccagcctcgggctggcagatttccagaagcgcatgaccgtacaggaactgtcgaaagaggggttctccgcgctggcttcaaccatagaaacactggccgccgccgagcgcctgaccgcccacaaaaatgccgttactttgcgtgttaacgcccttaaggagcaagcatgagcaccgtgactattaccgatttagcgcgtgaaaacgtccgcaacctgacgccgtatcagtcggcgcgtcgtctgggcggtaacggcgatgtctggctgaacgccaacgaataccccactgccgtggagtttcagcttactcagcaaacgctcaaccgctacccggaatgccagccgaaagcggtgattgaaaattacgcgcaatatgcaggcgtaaaaccggagcaggtgctggtcagccgtggcgcggacgaaggtattgaactgctgattcgcgctttttgcgaaccgggtaaagacgccatcctctactgcccgccaacgtacggcatgtacagcgtcagcgccgaaacgattggcgtcgagtgccgcacagtgccgacgctggacaactggcaactggacttacagggcatttccgacaagctggacggcgtaaaagtggtttatgtttgcagccccaataacccgaccgggcaactgatcaatccgcaggattttcgcaccctgctggagttaacccgcggtaaggcgattgtggttgccgatgaagcctatatcgagttttgcccgcaggcatcgctggctggctggctggcggaatatccgcacctggctattttacgcacactgtcgaaagcttttgctctggcggggcttcgttgcggatttacgctggcaaacgaagaagtcatcaacctgctgatgaaagtgatcgccccctacccgctctcgacgccggttgccgacattgcggcccaggcgttaagcccacagggaatcgtcgccatgcgcgaacgggtagcgcaaattattgcagaacgcgaatacctgattgccgcactgaaagagatcccctgcgtagagcaggttttcgactctgaaaccaactacattctggcgcgctttaaagcctccagtgcggtgtttaaatctttgtgggatcagggcattatcttacgtgatcagaataaacaaccctctttaagcggctgcctgcgaattaccgtcggaacccgtgaagaaagccagcgcgtcattgacgccttacgtgcggagcaagtttgatgagtcagaagtatctttttatcgatcgcgatggaaccctgattagcgaaccgccgagtgattttcaggtggaccgttttgataaactcgcctttgaaccgggcgtgatcccggaactgctgaagctgcaaaaagcgggctacaagctggtgatgatcactaatcaggatggtcttggaacacaaagtttcccacaggcggatttcgatggcccgcacaacctgatgatgcagatcttcacctcgcaaggcgtacagtttgatgaagtgctgatttgtccgcacctgcccgccgatgagtgcgactgccgtaagccgaaagtaaaactggtggaacgttatctggctgagcaagcgatggatcgcgctaacagttatgtgattggcgatcgcgcgaccgacattcaactggcggaaaacatgggcattactggtttacgctacgaccgcgaaaccctgaactggccaatgattggcgagcaactcaccagacgtgaccgttacgctcacgtagtgcgtaataccaaagagacgcagattgacgttcaggtgtggctggatcgtgaaggtggcagcaagattaacaccggcgttggcttctttgatcatatgctggatcagatcgctacccacggcggtttccgcatggaaatcaacgtcaaaggcgacctctatatcgacgatcaccacaccgtcgaagataccggcctggcgctgggcgaagcgctaaaaatcgccctcggagacaaacgcggtatttgccgctttggttttgtgctaccgatggacgaatgccttgcccgctgcgcgctggatatctctggtcgcccgcacctggaatataaagccgagtttacctaccagcgcgtgggcgatctcagcaccgaaatgatcgagcacttcttccgttcgctctcatacaccatgggcgtgacgctacacctgaaaaccaaaggtaaaaacgatcatcaccgtgtagagagtctgttcaaagcctttggtcgcaccctgcgccaggccatccgcgtggaaggcgataccctgccctcgtcgaaaggagtgctgtaatgaacgtggtgatccttgataccggctgcgccaacctgaactcggtgaagtctgccattgcgcgtcacggttatgaacccaaagtcagccgtgacccggacgtcgtgttgctggccgataaactgtttttacccggcgttggcactgcgcaagcggcgatggatcaggtacgtgagcgcgagctgtttgatctcatcaaagcctgtacccaaccggtgctgggcatctgcttagggatgcaactgctggggcggcgcagcgaagagagcaacggcgtcgacttgctgggcatcatcgacgaagacgtgccgaaaatgaccgactttggtctgccactgccacatatgggctggaaccgcgtttacccgcaggcaggcaaccgcctgtttcaggggattgaagacggcgcgtacttttactttgttcacagctacgcaatgccggtcaatccgtggaccatcgcccagtgtaattacggcgaaccgttcaccgcggcggtacaaaaagataacttctacggcgtgcagttccacccggagcgttctggtgccgctggtgctaagttgctgaaaaacttcctggagatgtgatgattattccggcattagatttaatcgacggcactgtggtgcgtctccatcagggcgattacggcaaacagcgcgattacggtaacgacccgctgccgcgattgcaggattacgccgcgcagggtgccgaagtgctgcacctggtggatctgaccggggcaaaagatccggctaaacgtcaaatcccgctgattaaaaccctggtcgcgggcgttaacgttccggtgcaggttggcggcggcgtgcgtagcgaagaagatgtggcggcgttactggaagcgggcgttgcgcgcgtagtggtcggctccaccgcggtgaaatcacaagatatggtgaaaggctggtttgaacgcttcggtgccgatgccttagtgctggcgctggatgtccgtattgacgagcaaggcaacaagcaggtggcagtcagcggctggcaagagaactcgggcgtttcactggaacaactggtggaaacctatctgcccgtcggcctgaaacatgtgctgtgtaccgatatctcgcgcgacggcacgctggcaggctctaacgtctctttatatgaagaagtgtgcgccagatatccgcaggtggcatttcagtcctccggcggtattggcgacattgatgatgtggcggccctgcgtggcactggtgtgcgcggcgtaatagttggtcgggcattactggaaggtaaattcaccgtgaaggaggccatcgcatgctggcaaaacgcataatcccatgtctcgacgttcgtgatggtcaggtggtgaaaggcgtacagtttcgcaaccatgaaatcattggcgatatcgtgccgctggcaaaacgctacgctgaagaaggcgctgacgaactggtgttctacgatatcaccgcttccagcgatggccgtgtggtagataaaagctgggtatctcgcgtggcggaagtgatcgacattccgttttgtgtggcgggtgggattaagtctctggaagatgccgcgaaaattctttcctttggcgcggataaaatttccatcaactctcctgcgctggcagacccaacattaattactcgcctggccgatcgctttggcgtgcagtgtattgtggtcggtattgatacctggtacgacgccgaaaccggtaaatatcatgtgaatcaatataccggcgatgaaagccgcacccgcgtcactcaatgggaaacgctcgactgggtacaggaagtgcaaaaacgcggtgccggagaaatcgtcctcaatatgatgaatcaggacggcgtgcgtaacggttacgacctcgaacaactgaaaaaagtgcgtgaagtttgccacgtcccgctgattgcctccggtggcgcgggcaccatggaacacttcctcgaagccttccgcgatgccgacgttgacggcgcgctggcagcttccgtattccacaaacaaataatcaatattggtgaattaaaagcgtacctggcaacacagggcgtggagatcaggatatgttaacagaacaacaacgtcgcgaactggactgggaaaaaaccgacggacttatgccggtgattgtgcaacacgcggtatccggcgaagtgctaatgctgggctatatgaacccggaagccttagacaaaaccctcgaaagcggcaaagtcaccttcttctcgcgcactaaacagcgactgtggaccaaaggcgaaacgtcgggcaatttcctcaacgtagtgagtattgccccggactgcgacaacgacacgttactggtgctggcgaatcccatcggcccgacctgccacaaaggcaccagcagttgcttcggcgacaccgctcaccagtggctgttcctgtatcaactggaacaactgctcgccgagcgcaaatctgccgatccggaaacctcctacaccgccaaactgtatgccagcggcaccaaacgcattgcgcagaaagtgggtgaagaaggcgtggaaaccgcgctggcagcaacggtacatgaccgctttgagctgaccaacgaggcgtctgatttgatgtatcacctgctggtgttgttgcaggatcaggggctggatttaacgacggtaattgagaacctgcgtaaacggcatcagtgagttgcggggtaagcggatgcgatattgttgccgcatccggcaaaaaaacgggcaaggtgtcaccaccctgccctttttctttaaaaccgaaaagattacttcgcgttgtaattgcgtagagcattacgccccagcacaatccccgcgccaaccatgccacccagcagcaccgccagaatcaaggtaattgcctttttcgggctatcacgacgaataggtaacatcggtttcatcacataacggtaagcatgaatatcaagatcatcaacttttaagctttcgatatccagcaggttttgacgagtctgatagtagtttggcgagaacaccaacggacgggtcgcctcatgcttaatcatcgactccagcgcttcgctccccaaaaggaacaacgtatcttgtgtgatatcttcgccagtctgttgaatctgcggttttgtcacctgcgcctgattcgcatactgcaacgcttcctgaatctgacggatacgcagatctttctgctcctgcgcgactacttcctgcgttcttaaagagtcctgcaagtttttccgtcccagagcaatgttgtctttgagatccttttctagctcttgattcactttatcgtcaacttgctgaatgtattgggccaacttcatttgtgcgccctctgcagtttgcccaacataagaaacagtcaatggtaattgctggttcttaacagaaggttcgatggtaagtttttctcgttcttcctgattatccagcgtttctgctaatgcagagaaggcagaactgaagcgaccaattaacgtctcctgcaaatccgatactttcggtgcagcctgaccatagataacattcatggcattgttatagccagcaatttgccccacgtcgggctgagtgataattgctgttgacgtccatttctccttcgctactgccaaatatccaatagccagggcaatagccacaatgacggaaatgatgattgtcatcttgccacgccacaactgcactagtaaatcaatcaaatcaatctgttccgggtcatggttttgcccagaaacattattattttctactctcatcattaccctaactgacggaaatttccaagtccgcatagtttagcgataatcctcgtgaatgctataggataagtgataaaaataatgaattgttgtgtaagtaacaaaagacaatcagggcgtaaatagccctgataacaagatgttagtcgctgccaaagagatcgcgggtgtataccttatctgccacatccttaagctcttctgccattcggttagagataatgacgtcggcttgttgtttgaaggtggcgagatcacgttccaggcgagagttgaagaatgagtcttctttcatcactggctcgtagatgatcacttcaacacctttcgccttgatacgtttcataatcccctgaatagaagacgcacggaagttatctgaaccgctcttcataatcagacgataaatacccaccacttgcggcttgcgtgacaaaatggcatcggcaataaaatctttacgcgtgcggttagcatcgacaattgccgagatcaggttattcggcacagactggtagttcgccagtaactgcttggtatctttcggcagacaataaccaccataaccaaacgacggattgttgtaatggttgccaatacgtgggtcgagacaaacgccttcgattatttgacgggaattcagacctaaactttctgcatagctatccagttcgttaaagtacgccacgcgcatcgccaggtaggtgtttgcaaaaagtttaatcgcttctgcttcagtggagtcggtaaacagcatcgggatattttgcttaatcgcgccttcctgtaacagagcagcgaaacgttctgcgcgttctgaacgctcaccgatgacaatacgtgaaggatggagattatcgtaaagggctttaccctcacggagaaattccggggagaatataatattttcagtgcgatatttcttatgcatcgctgcggtaaaaccaacgggaaccgttgatttgatgaccataaccgcataaggatttatctcaactacgtctttaattactgattctacactggatgtattgaaataattagttttaggatcatagtcggttggagtggcgatgatgacataatcagcatcccggtaggcttcatttttatctaatgtggcattaaagtgtattttatctgattgcaaaaactgctgaatttccttatcaacaataggagatatccgatcattcagcatagcaacgcgtgacggtaaaatatctaatgccacaacctcatgattttgtgcgattagaagcccgtttgacaagcctacatagccagtaccggaaatggtgattttcatttcatgctctcagaattaacttaactgtgaatcatgatgtttttagcatcctgataagagctaaaagttttaacgctacgttgttcgatggtcaacgcaacgaaaaacaattcagattttctttataagaatagctgatatttattaagttaatattaagcagtgaaatttagtctataagatatttggcaaaaaaaagcccggtgcaatatacgccgggcctcaattttattgttggttaaatcagattaatccagccattcggtatggaacacaccttctttatcaatacgcttataagtatgcgcaccaaaatagtcacgctgtgcctggatcaggttcgcaggcagaacagcagcacggtagctgtcgtaataggcaaccgctgcggagaaggtcggaaccggaataccgttctgtactgcataagcaacgacatcacgcagcgcctgctggtagtcatcggcaatttgcttgaagtacggagccagcaacaggttagcgatctgtggattttcggcataagcatcggtgattttctgcaggaactgcgcacggatgatgcagccagcacggaaaatcttcgcgatttcgccgtagttcagatcccagttgtactcttcagacgcagcacgcagctgagagaagccctgggcgtaagaaacgattttgcccagatacagcgcacgacgaactttttcgatgaactcagccttgtcgcctgctggctgtgcttgcggaccagagagaactttagatgcggcaacacgctgatctttcagagaagagatataacgtgcaaacacagactcggtaatcagcgacagcggttcgccgagatccagcgcgctctggctggtccatttaccggtacctttgttagccgcttcatccaggatcacatcaaccaggtagttaccgtcttcatcttttttggtgaagatatctttggtgatgtcgatcaggtaactgctcagttcaccgttattccactcggtaaaggtctgcgccagttcttcgttggtgaggttcaggccacctttaagcagagaataggcttcagcaatcagctgcatatcgccgtattcaataccgttgtgaaccatcttcacatagtgacctgcgccatcggcaccaatataggtaacgcatggttcaccgtcttcagctacggcggcgattttggtcaggatcggtgctaccaattcataggcttctttctggccaccaggcataatagaaggacctttcagcgccccctcttcaccgccagaaacaccggtaccgatgaagttaaagccctctgctgaaagctcacgattacgacgaatagtgtcctggaagaaggtgttaccaccatcaatgatgatgtctcctttatcgagatatggtttgagggaatcaatagcagcatccgtgcctgcacctgctttcaccattaacaggatgcgacgaggcgtttccagagattcgacaaactctttcaccgtatagtaaggaaccagtttcttgcctggattttcggcaatcacttcttccgtcttctcacgggaacggttgaaaatagagacggtataaccacggctttcgatgttgagcgcaaggttgcgtcccatcactgccataccgactacgccgatctgttgcttggacattacatactcctgtcaggtgtgatcaccgcgctgaatgctcgcggcctggaatgttcgcaaataagtatacaaagtacttattaaagtataaatagcttatccatgcttatatgcttacggctttatattacgggtgaaaaactgatgaaattcgatcaaagttgcgatttgataaaatacgttttctggctaaatatctaaaagtactttttaagtgccatctgaaggcttttgaaaaaaaacttcgattgtcatgatgagcataatgtatcgcatgaaaagcgggaacataatgaagtctgacaccagccaggctaagcctcaagcacaggtcaatatcttcacagtacataaagtaaccttgatcgaagccatttacacgcacaaaatctgaaaaacgtaccagcataaatgatcctgcgcaccaatcaacaaccgtatcagaatagatactttctttaggaatttttgttttattaaggaaggtgcgaataagcggggaaattcttctcggctgactcagtcatttcatttcttcatgtttgagccgattttttctcccgtaaatgccttgaatcagcctatttagaccgtttcttcgccatttaaggcgttatccccagtttttagtgagatctctcccactgacgtatcatttggtccgcccgaaacaggttggccagcgtgaataacatcgccagttggttatcgtttttcagcaaccccttgtatctggctttcacgaagccgaactgtcgcttgatgatgcgaaatgggtgctccaccctggcccggatgctggctttcatgtattcgatgttgatggccgttttgttcttgcgtggatgctgtttcaaggttcttaccttgccggggcgctcggcgatcagccagtccacatccacctcggccagctcctcgcgctgtggcgccccttggtagccggcatcggctgagacaaattgctcctctccatgcagcagattacccagctgattgaggtcatgctcgttggccgcggtggtgaccaggctgtgggtcaggccactcttggcatcgacaccaatgtgggccttcatgccaaagtgccactgattgcctttcttggtctgatgcatctccggatcgcgttgctgctctttgttcttggtcgagctgggtgcctcaatgatggtggcatcgaccaaggtgccttgagtcatcatgacgcctgcttcggccagccagcgattgatggtcttgaacaattggcgggccagttgatgctgctccagcaggtggcggaaattcatgatggtggtgcggtccggcaaggcgctatccagggataaccgggcaaacagacgcatggaggcgatttcgtacagagcatcttccatcgcgccatcgctcaggttgtaccaatgctgcatgcagtgaatgcgtagcatggtttccagcggataaggtcgccggccattaccagccttggggtaaaacggctcgatgacttccaccatgttttgccatggcagaatctgctccatgcgggacaagaaaatctcttttctggtctgacggcgcttactgctgaattcactgtcggcgaaggtaagttgatgactcatgatgaaccctgttctatggctccagatgacaaacatgatctcatatcagggacttgttcgcaccttccttaatccctaacataaatgacacaataaaatcagaaagcacaggaaattttcttacggaataatcatgtaaagatttcgcttcatctcggaacaggcataatgtactaaaagcataacgcttactttcgacatatttaatatatgtcagcaaatcatcatgcttcatgatgatatcgggattcaaaaacaaaatgtaatcatcatctgcgggtctatatttttcctttacatacgccaccgcaatattattattatgaccaaagccgtatacacctccactaatatagtccaggcctgcataatgctggcatatttgtttcaataatagagagtctttgttgtcgcgtacgataatcttgtagtgctcatcgtcagcattaagattttcgagtaattttttgatgtagtcttcatgtccgtgggaaacgattattatatataccatttcaatgttcttcagtaataaaattaactagttcatcaaacccaactaatacattttcattacgataaatgaaatttgcatcagagatatcttttttgaggttaccttttttgaagtcaataataagtttaactaacatgtcatcgttattagaatcaaaaaaagctttcttttcataactaccaagagtttctctagtaaatgggaaatctgatgctaatacccacttacctcgctctttagcttcagacaacggcaatccccatgtttctaacctagagggaaaacaaactatatctgaaatattataacaatgatcgattttttctttatccaagtacccgaggaaatgaacattatccagtccttctgcaagactgataatatattttgcatacgcattttctgtaccactgatagtaagcagaaatttaatattggattgttctttcaatttccttgctgcactaataataagctcgtaatttttaaatactcgtggaacagcagggtaaaatattgtcaactcagaagggttattcttaaattgagaatcatcatcagtaagttggcttttatcagataatttaatttctggccgactgacaatgatgttatttatagaatatttcttgataaatttttctttcatccagaattgttgaacaaacactgcagtattttttttaatgtttattttatatatcagcccgtatagcattttaaataagaaaaagctaggctccataagaatttcacggaataaaattcctttataaaaaggtgcagggttatgacaatacacatatctttttttagtgacgacattggccgtaatatcatgcagacaaatccaatgcgtagcattcagctcttttgaaagttttttacaaactacatattcaaagtgcaaacgttttagccacgaccctttaacctcaggaaactcaatgaatttaacccatggataactttcttttaactctttagcagaatggactaatgcgataaaactgacattttctttattattagttgctgccaaaaattttttcaaaatggtaaatggaccgccagtggtaaaattgaccgcagaaacaacgactatgctttttcccataatttggtctcatgattgtatttctttatgatttttgctggtactcccgcaatgacagtattttcgggaatagaacctctaacaacagaattggcgccgactacgactccattaccaataattgttccaggcaaaaccgtcacattctcacccaaccaaaccctctggccaattacaacagctgaagattccaacgtgcgcatgtctggaggtatatttggcgaactcattggatcagagtgcttaaaggaaccgtgattatgatcggtaataaatactttacttgcaataagcgtatcccgacctatcgtaacgctctcaattgaggcgatatgaacatagtcgttaacttgcacattatcggaaaaaaaaatcacgccacgtccaaatgcatccagcctgagaccgactccacttgtgaaattttcaccaaaattaatgctaccatcattgcgaatatagcagggaaatcgaataattctacagttccggtaaaatacacgagtcaataagacatctctaacaagccgaataaaaccacagagaccatatcgtttagcgagttttaagatcatcgatcacctcttcaagaacatccctgaagtaacttcctgttcgaattttctgagaaataatttttgtattctcactaatttgcttataagtttctattgtcatggagtcaacaatctcttgcatttctttgattgatcccactgcatatcctattctattatctacaatgaaatccgcaagggcggctttatcccatataaatactggaagttccattgaaagataaagagatgtcttatgagggttattaaactttaaatagtcgccaaaggcaccactacaggtttcgacagaatctccatcccaaatgagtccaaattgcatgcctgggaggttaatcttttccggagattgagcatcaaaacttccaagatatttaggattatctttattttcatagttgacaccaaagagagtaaaatcgcatccttcagtatatatgaaagaacatttatgcctagaaaggttgccagcatatatgacccctcgttgcttatccgtaacatctcgatgctccacatcagatgagacgaggtaatcaaatatttttatgtctttgattttatcctgagacatatatttactaaggtactttgtcatttgtggattgtgacttatgaccatatcacaggtagcaagccgcacagaatcactaccccctcctcctcttaattcatcaatatcatgaatcagaggtactattctaaattttagaaggcggtgaaagaatgacaatatatgccaaaatggtttggccatcgggaaattgaaaattaaaacatctttattttcaagaccgcagagaaatgtactaagcttaacagaactaataattctctggactactccaccccatagaggaatgttaacaacagaaatgttttcataatctgaagcaatgtccagtgcatcttttcttgctttaaatccagcatcgcgtctagagaaatttaaatcattcaaaaaatacattttcactttattttctgggccttaagaaattgagagaatactatgatacaaagagttatttgtatccaactgctaatattagtcatgaagctttcatgataaaaaatgaaagaaaaggtataaataaaatatgaataaaatattttcacagatatgtaatttcgagacaatctccataaaacacctgaaatacagccatgaataaccatcatcaaatagcttagctccgcggaaatataaacataatccgaaaaagcagtataaacatttgttggcaaacccacccacacaaattctttatgcaacgacatagagactccacctgttaatagccccatcagcctttcaaaaaaccaaaagacatgagaactggcagagttagatacttgctgaaaataaaactcctgaaacgcgattatagggctgaccaaatacatggatagataatatgccatccccccaggcagtccacgtaaaaagagcatatacaaggagaatagaacacctacagctgtaataagataaacataatgttttactctattaacacctacgatgaatgcataagagatgataaccataaagacaatttgcttaccagtattcagtataattgcaaagatgaatacaataaaaacaagtaaagtaaatgttttacttacctttgtattagtaaattttttagaccaaataaataaagcaaaagtagttagaatgattggctgcatgtatgctgagaaatttcttgatgtgtcttcaacatcagcatctcttatcaaattcatatagctaagtaagctagtcccgaactggtagttacttaacctcatgcatatatatatcatcgaaaaagaaataactaacaagcctacattatgcactttcttcgatggtatgctataaatagcattattgacttttctgatatttagatctaatacactttccgtcaataaacatgacagggtaaatgtcaaaacattgcaaagtagaaaaatcaacgtagcgtcatttaactgaaaagcatatatatctgacgttatttcatatcccaataagaccagtgcgaagatgatattaacgcatacggctggataaaatatatccttcttaagatataaacagataaatgctgtaatgagaaagacactaattacaagatagatcattaatccgtactcattatatttttcacttgataaagagcggcagatatcacttgatgcatatcataatatttatactcggccaaacgcccgccaaatataaccttgtcttctctgctagctaactctctatatttcttaaaaagctccatgtttttattatcattaactggatagtagggttcgtcgccaactttccactctaatggatattcttttgtaacaaccgtatgctttgtctcaacatagtcaaaatgtttatgctcaattattctggtatatggtacattagcatcagtgaaatttattactgcattcccttggaagtttggaaattcatggcgttccgtctcaaattttaaagagcgatattctaacgctccaaacctatagtcgaagtactgatcaatgggtccagtgtagatgattctatgggctttactcgctagagaatctttgtctttcaaaaaatcaatgcctaattttacgtccacaccttcaagcattttttcaataagcttagtgtagcctcccaccggaataccttgatagcgatcggaaaaataattgttatcaaacgtaaatctcactgggattcgcttaataataaatgcaggcaattcttttgcacttcttccccactgcttctccgtataaccctttatcaatgcttggtataagtcctccccaactaatgaaatcgcctgctcctccaaattttcaggtaccttgtcaccatacttttttttctgagcattaatgatattttgagcttcttgaggatctttaactccccacatttggtggaaagtattcatattaaaaggaaggttgaataatttgtctttataaatcgccagtggagaattagtaaaacgattaaattctactaaatcattaacgtaatcccatatatatttatcattggtatgaaaaatatgtgcaccatatttatgaatctggataccctcacagtcctctgtgtacgcatttccaccgatatgatttcttttctcaatcactaaaacttttttgtttagcttttttaactcattcgcacaaacggcaccaaacaaaccagaaccaacaatgatataatcgtacataaaatcctcagcaaaccagtaatttattatttcttacgaacatcagcatgagtgacgtaactaagcactctgttgcaagcaatgttattgctgcaccaatctctttaaaaagagttgttagcggaaaaatcaacaacaaactcaacaaacccgcagcgattaaaatcttactgaattctttcttataattatgggtcagcataacttgaatgccatagacattacttaatgaaataagaaaaggcagaggcgatataatcattagcacaatcactgcattatcatatcccggccctatacttatttttactagtatagatgcacccaagagcagaattaatgaaaaagcaccaccaatcaaactcaagcaggtcaatgattttttaattaaaatcacacccttcacacgattaagaacaagcgtacttgatattcttgggtatattgcttgggtgataggatttaatagcccttgaagcgcgtttcttatagtattggccgcattaaaattccctacggacgttggtccagatataaatcccaggataataactattcccgtagaatataaactaatagcagatgtggaaataaaaacatgaaaaccgtctgctaaagatcgacgcacattatgtaatgatagcgtaactttaccaatccaaccttcatgaacaacgatagctagtgcaataattccagcaaccagatttgcacttgactgaataaaaccggcaattgctatatctgactttgtgttcacaaaaataaatgttagagggataatagccaagcgggataaaatactacttaaagtcagccatttcattttttcttttccctgaaacagccagatagggtagattaaattcccgactaatgcaggaacaaacgaccatataattacggcatgcttgttatattcaggaacaagcaaggtcatcgacgttaagaaaatcaatgtaatgacgataagaactatttttgaaaatatcaccgcccaaaaaatagacgttactttatctttactatctgctgctttggcaatactctgagttgctgtgagattgaaaccatattcaacaaacattatcatatatagcatagtcgcttggcaaaaaccgaatataccgaaattttcaggaccaagtgttcttacaagatatggaaatgtaagcaatggtaaaagataattgctaccttgaacgacagccagatatataacgtttcttcttaaagataatttattcgtattcatgcaattaattttaatctgataagctcatctaacgtaaagagcctttcatcttttggcgaaaggattaaccctgatgtttggggccaatcaattgcaatgcgttcatcattccaacatattccacaatcgctttcaggatgataatagtttgtagttttatattgaaattcagcgatatcagacagaaccaaaaagccatgagcaaacccttttggtatccacaactgctgcttattatcagctgaaagcagaacaccaacccatttaccaaaggataccgaattgggtcgaatatcaacagcaacatcaaaaactgctccatgagtgcagcgtacaagtttatcttgtgcgtactcgccgcgttgaaagtgaaggcctctgagtacattttttgatgaacgtgagtgattgtcttgaacaaagctgaccggatagcctagaatatgttcaaatgctgattgattaaagctctcataaaagaaacctctatcatcaccaaatactcttggctccagaattagcacatcttcaatttcagttctaatcacattcattaatttgaatccttcgtcattttataaagatactgcccataattattctttattagtggtacagctaattttcttacttgctcaacatcaataaaacctttacgaaatgcaatctcttcaggacaggaaaccttcaatccctggcgctcttcaattgtcgcaataaaattacttgcttctatcagactctgatgagtccccgtgtccagccacgcgtagccacgccccatcatcgcgacagacagacgtccctgctcaagataaatacggttaatatctgtaatttctaactcaccacgtgcagacggcttcaagtttttcgccatctgaaccacgtcgttatcataaaagtacagacctgtaacggcgtaattactctttggttctaacggtttttcttccagactgattgccgtaccgtttttatcaaactcaacgacaccatagcgttctggatcattaacgtgataggcaaataccgttgcaccactttctttgttaacagcggcctccattagcttcggcagatcgtgaccgtaaaagatattatcaccaagaaccaaagcacaatcatcaccaccaataaactcttcaccgatgataaatgcctgcgcgaggccatctgggctaggttgcactttgtactgaagattcaggccccactggctaccgtcacccagcaattgttgaaaacgaggagtatcctgaggtgtactgataatcaaaatatcgcgaatacccgccaacatcagtgtagagagcgggtaatagatcatcggtttatcataaataggtaatagctgtttactgacagccatagtcacaggataaagacgtgtaccagaaccacccgctaaaataatacctttacgcattttcatttcatcattccttttaattcatcttgctccaccatcacgaacaagatgcaaaaactattaaattgctgtagtcgtaaataattcattgagcattcgtttcacgccaacctgccagtcaggcaagacaagcgcaaagttctgctgaaatttttctgtattaaggcgagagttatgtggacgacgagctggtgtaggataggctgttgttggtactgcgttgagcttgttgagtgcaaggggaatgcctgctttgcgcgcctcttcaaaaaccagcgcagcataatcgtaccaggttgtggtaccactggctaccaaatggtacaagcctgcgacatccggtttattcagtgcgacacgaatggcatgtgctgtacaatcagccagcagttcagcacctgttggcgcaccaaactgatcgttaataaccgctaattcttcacgctcttttgccagacgtaacatcgttttggcgaagttatttccttttcctgcatagacccagctggtccggaaaataagatgcttcgcgcaatattcctgtaacgctttttctccggctaacttggtttcaccgtaaacatttagtggtgcggttgcatccgtctccagccatggcatatcgccatttccagggaagacgtaatcagtcgagtaatggataacccaggctccaacttcatttgctgctttcgcaatcgcttcgacacttgttgcgttaattaattgtgcaaactccggttctgattctgctttgtctactgcggtgtgagcggctgcattgacaataatatccggccgaatgcttcttacggtttcagctacaccttcaggattactaaaatcaccgcaataatcagtagagtgaacatcaaaagcaatcaaattacccaaaggtgccagagcacgctgtagttcccaacctacctgccctgttttgccaaaaaggaggatattcattactggcggccctcatagttctgttcaatccacgattgataggcaccacttttcacattatcaacccattttgtattggacaggtaccattccaccgttttacgaatcccgctctcaaacgtttcctgtggtttccatcccaatgcgcgaccaatcttctcagcatcaatagcatagcggcgatcgtgtcccggacgatcagcaacataagtgatttgctcacgataagatttctctttcggtacaatctcatccagcaaatcacaaatagtgagcactacatcgatgtttttcttttcgttgtgcccaccaatgttataagtttcacccgctttaccttcggttacgacggtatataacgcacgcgcatgatcttcaacatacaaccagtcgcggatctgatctcctttgccataaataggtaatgccttaccttccagtgcattaagaataaccagtggaataagcttttccgggaaatgataaggaccatagttgttcgagcaattagtcacaattgtcggtaaaccatatgtacgtttccacgcgcggactaaatgatcgctggatgctttggatgcggaataagggctgcttggcgcgtaagctgtcgtctcagtaaataagggtaattcttctgtattatttacttcatctggatgaggcaaatcaccatagacttcgtcagtagaaatatgatgaaaacggaagctatttttcttgtcgctatcaagagcagaccagtaattgcgagcggcttccaaaaggacataagtaccaacaatattggtttcaataaatgccgcagggcctgtaattgaacggtcaacatggctttcagcagccaggtgcatcactgcatccggctgatgctgagcaaaaatccgtgccattgcaggtgcatcgcaaatatccgcatgttcaaaaacatagcgttcagaatcagaaacatcagcaagtgattcccggtttccggcgtacgttaatttatcgacattaacaacactatcctgcgtattatttataatgtgacgaactacagctgaaccaataaatcctgcgccaccagtaacaagtattttcacttaatttattccatattacttcagagcatgctgtgaaataagcggctctcagtttgattaatagaggtattaatgcacgctaccgcccctggctttacagctaccagagcactgcatgcatgcctatgatgtgacgagcgttacccactcgcgctaaacccgaaaaattcaaacgctaattgtcttaccaatccgctctggaaacaaggaaaatcctggaaaactttgaataaaaccctactgctaactcgttgttattctgatggtttatataaaacaacggcaggaagattcgcaacaaattacttttgctgcgaattttcactgccgttataattttcttatcaaccgttacatccggtcagattttcattattcgcttaacagcttctcaatacctttacggaacttcgccccttctttcaggttgcgtaggccatacttcacaaacgcctgcatatagcccatttttttgccgcagtcgtaactgtcgccggtcatcagcattgcatcaacggattgttttttcgccagctcggcaatagcatcagtcagctgaatacgtccccatgcaccaggctgagtacgttccagttccggccaaatatcggcagaaagcacatagcgacctacggccatgatgtctgagtccagcgtctgcggctgatccggtttttcgataaattcaacaatgcggctgactttaccctcacggtccagcggctctttagtctggatgacggagtattcagagaggtcacccggcatacgttttgccagcacctggctgcggcccgtttcgttgaaacgtgcaatcatggcagcaaggttgtaacgtagcgggtcggcgctggcatcgtcgatcacaacgtctggcagtaccacgacaaatgggttgtcaccaatggcaggtcgcgcacacaaaatggagtggcctaaacctaaaggttcgccctgacgcacgttcataatggtcacgcccggcggacagatggactgtacttccgccagcagttgacgcttcacgcgctgctcaaggagtgattctaactcataagaggtgtcgaagtggttttcgaccgcgttcttggacgcgtgagttaccaggaggatttctttgatccctgcagccacaatctcgtcaacaatgtactgaatcattggcttgtcgacgattggtagcatctctttgggtatcgccttagtggcaggcaacatatgcatcccgagacccgctacaggaataactgcttttaaattcgtcattatttcatccacctgtaaaatggttgctgaattatagcttgttcgatttttttcgccagcatcaattaccctgaattgattactgaattacttgtgatgttacgccgcttcgttgtggattgcagtagcattgttcctaagtatgactccatttttccaggaatggtcgcaaatctactccctcagttccggcaatctaaagttaatcttctccacattaacaatatggtgattaatcctgtcgatatcgacggagctttgtcctttttcattcaccgcatgaacatttgcaagagacagcagtgtttcttttttcgccataaaaacaccacgaacgtctttgcgcatgtcaaagttcatgctcaatgcgggtccaactgaggattcctgcatcacattgatatttcgcataaaaaaatgttgcggtttgttgtgtaactccagcgacgcacgcttcatctcaatgttagttagcgccacaaaggaaacagcattcccggcggagatttgaatgccgcgcaatttataagcaagatgagtattatccagttgaatatcattcacccggaaattttgcggtatcgagagatatttgcctttaattaccccatagccgattaacatcccggcgctattaatcatttcaatattatcaatcacgaaattgtcacaaccgtaaatagcgactgtcgcgttatcaatgcccgctttcttactgaaatccggcgtgatattgcgggctttgatattacgaataacaaaatgtttaccattttcaacatgtatcaactgccgacaatccgatcccgtgatattcgccacgacaaagtttttcactgcctggtcttccgggtagttgttatcataagtgcttcccgcaaggcctatgccgatgccccagttgattttgccgttggtacagttgatgcgctcgatgacatggtcagatatcaaaatatcacggtcgttaattgccacgttccattcaatggcgtcgccttgtaagtcgctgaacttacaattggtgatgttggcaccgataatctggttatgaaatccctggcgtaagatggcgtaattagcgtggctaacggtcaggttatcgatgatcaggttgcgcatgacccgtttgtttttgccgccgatataaatctgcgtcaccgggccaaagccgctcatagtcagccctttgatggtgcagtcagaaccacgcacatccagggtgatgttatgcatactgccgccatcctcccctgtcacctggctgccgtcctgtaagacaaatcgccctctgccgttgccgcgcaagcttccaagaatgtgtaacgttttaccgggagggataaagatgccggtgttgatattgtcacaaaccaatccggcaggcacgacgactgtttgcccttcgctgaaggcttgtttaaatgaggcgatccagtcgtgtgggttgtagtcgttaatgttaacgctttgtcgggcgggaagcgcgcgggcgaaaggggtatggaggaaggcaagcgccgagcttgccgtcaggaacgtgcgtcgggagagttttttaaatggcatgcgttctcctctataaagcctgcagcaagctggcgagttctcgattgatcacctgctggttaaaatcgtgttcaactttttcgcgcgcgcgtttgacgaccggagccaattcgtcggtgtccagttggctaaacgccgccagtcgttgcgccagtgcgcgagcatcgttctcaggcaccagccagccggatttgtcagcctccaccagttccggtattccactatgcagagtagaaaccaccggaataccgaccgccatcgcttccattagcgccaccggaataccttccatatcaccatccgcacctgtaaccgatggcaacaggaagacatccgcgtcgtcgagcatcgctttcacttcatggctcggtttaaagcccggcatctccaccacatcttccagttgatattgttcgatgagggtgcgcaggcgtctttcccacgggccaatgccgaggatgcgatagcgaaatgccacgccctgctctttcaactgacggcaggcttcgatcgccacatgcaggccttttttctcggttaagcgtgcgacggaaataatctccagcggcgttgcgggcgctttcacgggacgcgggctaaagcgcgtcatatctacgcccatgcgcgatacggcgattttttccctcgggcagcccattttttgcagccttccggcccacagatcgcttatcggtaacatcaggtcgccacggcgaaacagttgctgatattcgggagtgtagtggttgagcacttcccgactggagatatcaataccgtggaagatagtggcaattttgccgcgaatgacacccagttcgcggagttttgctgcggttacccccgcgggaccaaaatgagcgatgaacacatcggcgcgaaacggtgttgcgacctggccgcaaatggcagacaaaatcaggttccgcgactcggcaccatagcgtttgaggttgagcgcctgccaggtatttttacgatgaatgccgcgcaaggtctggctggctcggtggcgcagtttcgccactttgcccgtaggttcgtcctgtaaccagcgggttctggcagcaaggttgtatttcgtccatgccgcgtgggtgttttgtgtgtcgcctttttgcagcgcgagaatctctacctcaaatcccatatcaataaacgcggtaatttggttaaggacgaaggtttctgacgacagcgggaatttcagtaaaaagaagccgaccttcatttcacctccccgatgcgctcaagcacagactgcaccatctgcattcctgtctgacgctcacgactgacggcttcactaagtcgcgcattcagcgccggaagctggcctaaggtatccgcaaccatcgcttgcaggctgccgtctaataaatgacggatatcaattgccatctccggtagtcccagctgctgcataatcccggcggatttatgttcgtagttgatggcaattgccggagtggcaaaattcatcgagataatggcagagtgcaggcgcgtaccgacggtgagttcacaggcccccagaattttgcccatttccagatcgttgagttcatccatcactacgtggtaacgggcaggatcgctgatgtgctggcgcaggttgagcgccaccatgcggtcgtctttgttatagctgtcaatgcccgtacaggtggagagcgcaatcacctgatacccttcatcgagaatgcgattgaccaccccggcaaaggctttttcatacgcttgttgagtggtgccgagacgtttgtcaaacggtgccagttcgcgcagggtaatggccaccgttttctgttgtgcggcaacgtccagccagtgttgaacggcatagctggcggtgaagtcttctgtgtggtgatcgaccagccacgcggtatcgacgccatgttccacttttgcggtggtgatattgctgcgtttcatcagatcaaagctgaccgattcgcgcaggatcagcgcgtcgcagtgaccaaaaacgtagttcgccagttggttaaattgctcatcctggaacgggccaacactgtgaccaatcataaacagcggctttttcgccataaacgtgcaaagtgcatgttcaaactgcggcacgccatagagatcgacaaaaaacgatccgccgacctggataatggcgtcgtaacctgacagcaggcgcacgaagtcggtgaatccctgggcgatggcgatattgcgcagcttgccagtgtcggtgacgcgtgagagcaatacctgatgctggtagcggcgacggaggacttttttaacgcgcccgacaacgcccgccgcgctgttgtgttgtttcatttgcaggaacagcggatcgcccattaccgggcggttgagcagccaggaagaactgaccggatagcggctcatcacatccacttcggcgtgtggattgagaatgttgatggcatcaagtaagccgcgcaggatggcgctgtcgccacgattgccgcaagtgtggttgcccagaataagtaatttcattttttcctcataaatttgatgccaggtgaggctgcgtttgttttgttcgttgccgctttttgcctgatgcgacgctgacgcgtcttatcaggcctacaagacccgagcacagaaccgtaggacggataaggcgttcacgccgcatccggcattcagtgcctgatgcgacgctgacgcgtcttatcaggcctacaggtcccgagcacagaaccgtaggacggataaggcgttttacgccgcatccggcaaccgttgtcggaaccgaaaacagcaactcaccccgcccgtaaaagcattttcattttttcgctgcgacaaaactgacgcttcacttccaccaccagcggatggcgcgacagcacaatcatcaccacaaacgccagcacccccgtggctatttgcaccgccagcagcatccccagcgccagttgccctttcagcacaatgcccagcgcataactgaccaccagcgtcggcagcgagagataaaacggcagccataaactcaggatgtactggcgataactggaaccaagaaccggtttaatcatcacgaagtaactcagaatggtgttgataatttgcaccagcaggaagccaagcgtgacgccgatcgcgcccgccatctgcccacctataacaatcgccggaataaacagaaatgttttgaatacgttgaatttaaagctgatatcgacccgcgctttcgccatcagcagcgaaccaatcgggttacctacggagcgcagcagacccaccacacacagcaattgcagcaccggaataatgctgttccacttctcaccaaagaccagcggtacaaagttattcgacaccaccattagcccgagcagcgccggaaagttgataatccccactaccgacagcagcttgtagaagttaacacgcagcttttcggtatcgtcctgaattttggcgaatgccggaaacaacacgcgggtgatgattgggttcagcttcatcggtggcacaacggccacgttgtacgccaggttgtatccccctgccacgcccgcgccgagaatacgcgccagcacgagcgttgaaaggttggtattgagatagttgatgatgctgtccgccgtcagccaggcaccaaagcgtaagttcggtgccaccgacgccagcgagaaatgcagaccggggcgataaattttgcggccaaagtagccaaacagcagcgttctcaccgcactattgaccagataaccgaggatcgcggtcatcgccagcggccagaaatgggcgctaaccaccgtacaagtgaagcccgccagcaccgcgctggtttcgatcatgccgattttgttgaactccagctctttttgcatcaacgcgcggaactgttgcccgtgggggattaccacaaacgccagcgataatgttttaatcaacggtgccaggtccgggttattcagcacgtcgccgatgagatcactcaacaaaaacaccgccacgcacaccacgatccccagcccgacgttcagccagtacaacgtggtgagttcaaggtgactgatttcttttcgctgaataatcgagttagcgataccgaagtcagaaagcgtatctgccagcgcgataatcaccagcgacacggtaagcaggccgaactggtggttgtcgataatccgcgccagcacggtcatctgcaccagcccgaggccgatgatgatcaccgtggcaatcgccgaccacttcgcgccgctgatggttttttcacgtaagctcatatcaatatgccgctttgttaacgaaacctttgaacaccgtcaggaaaacgattttgatatcgaaccagacgctccattcgcggatgtactcaaggtcgaactcgacgcgtttttccattttctccagcgtgtcggtttcgccgcgccagccgttaatctgcgcccagccggtaatgcccggtttcaccttatggcgcagcatgtagccttcaatgagctgtcgatactgttcgttatgcgctactgcgtgcggacgtggaccgacaatcgacatccccccggtcagcacattgataaactgcggcaattcatccagcgaggtacggcgcagaaagttccccactttggtgacgcgcggatcgttctgcgtcgcctgggtcaccactttgtcgttctccatcactttcatggaacggaacttccacactttgatcggcttgccatccatgccgtagcgagtctggcggaaaataaccggccctggtgaactgagtttcaccgccagcgcaatacagcacagcaccggggagatcagcagcagaataagcgtcgccagcacaatgtcttccgcacgtttgagcaggcggttaaccccggaaagcggcgtgtcgtaaagcggcaccaccggtacgccgttcatctcttcgaggcgtgaatggagaatgttgaaggtaaagacgtcggggatcagcagcaccgaacaggtggtgtccgccagttgatggaccagttttttcactcgcgcgccgtcgcacatttgcatcgcgatatagacgttatgaatcttgcccgctttcgcgtcctcgaccagctgttgcaggttacccgcccagtcgttagaaacgccgcccggtttcgggtcgtggtaaacgcccaccacttcaaaccctaaccacggctggttacggaagctctccatcagcatttgcccggcggctaaatcccccgccaccgcgaccatgcgcttgttatagccatgattacgcagccagcccgccccaatgcgaatacacgaacggcaaaccaccagtccgatgctggtcagcgcataccacgccagccagattttcagttgcgtgtcgaaatcattgttgaacgccaccagtccggcgctgaaaatcacgcttaaggtccagttttgtagcaacagggcaaattctgtcgctgcccgaacaccgcgccatgagcgataaaaatcggtgatgccgcccagcatctggaacaccaccagcgtaatcagcgccaccaacaggtgcatgtagaggaatgacagtccgctgacttcgcaaaccagccatagtccggcaaacatgatggtgatatctgaaaagcgttgcaccatagagattaacgatgcattggttttcgctcgctcgcgcttttttagatttgtcatcgttgttcctgttattagccccttacccgcagtggggtaagggaagatccgacattactcgttcagcaacgtcagcagagttcgcgttcgcgcttccatcagcggcacatcaccgcgcgattccacattcaggcgcaccaccggttcggtattggaggtgcgcaggttaaagcgccagtcggcaaaggtcatgctgatgccatcggtgcgatccaccgccagcgcctcacggctaaaatgctgttccacgcggttaatcgcctcaacgggttgcgccagtttgctgttgatctcaccgcttgccggaaacgccgccatccggtcgcgtaccagttcgcccagcgttttatctttcaggcacaccagttcggcgaccagcagccacgggatcatgccgctgtcgcagtaagcgaaatcacggaagtaatggtgggcgctcatttcgccaccatagatggcgtcttccttgcgcatacgttctttaataaaggcgtgtccggttttcgacattaccggcgtgccacctgcggcagtcaccacatcaacggtgttccaggagagacgtggatcgtggatgatcttcgcgccgggatttttttcgaggaatgcttctgccaacaggccgacaatgtagtagccctcaataaactgccctttttcgtcaaacaggaaacagcggtcaaaatcgccatcaaaagcaatgcccatatccgcgccgtgtttgatgaccgcattgcgggtgtcgtcgcggcattccggcagtagtgggttaggaataccgttggggaaattgccgtccggcgtgttgtgcactttgattaattccacgggcgcgccgagggctttaaagcgggcttcaatggcgtccaccaccggacccgctgcgccgttcccggagttgatcaccagcttgagcggcgtgaggtttttgacattgatataaccgaacaggtgatcaacgtaagcgtcacgcaggttgatttgctgatagcgaccgcgtttggtttcatcgacgggaggaaagtcgttggcttcagccagacgctggacgtcgcgcagtccggtatctccgctgatcgggcgagccccctcgcgaaccagcttcatgccgttataatccatcggattatggctggcggtaacttcaatgccgccatccacgccgagatggaacgtggcgaaatagatctcttcggtgccggacataccaatatccagcacgtcaacgcccgcatcctgtaaacctttcgccagcgccagttttaaggtttcgctggtgaggcggacatcaccgcctaacacaatggttttcggtttgagaaattcgccataggcgcgaccaatgcgccaggcgatatcttcattcagttcttcgcctaatttcccgcgaatatcataggctttaaagcaggttaattttttcatatcgttaccctttttcaggcaatagttggccctgaccgaagcggccaattttatttttgtcgttatttacaccgcggtttcgcattcattgcctgatgcgacgtttacacccgtccgtagcgatccgcgaaacgcaccacatcatcctcttcgagataagagccggagcgcacttcaattaaatcgagcggaattttccccgggttttccaggcaatgcgtcgcccccagcggaatataaatggactcgttttcaccaagcagtttgatatcaccatcaatggtgacttttgccgttcccgcgacaaccacccagtgttccgcgcggtgatggtgcatctgtaccgacaagccctcgcccggtttcacggtgatgcgtttcacctggtagcggtcgcccgcgtcgatagagtcatatttgccccacggacgatacacttcgcgatgcacccgatgctcatggcgaccatcggctttgatctgctcgaccacttttttcacatcctgtaccgcgttacggtcggcaatcagcaccgcatctttggtctgcaccactaccagatctttcaccccgacggtggtgaccaggccagattcagcatacacatagctgttttcagttttgtgattaatcacatcgccgtggcaaacgttgccctcggcggtgtgggcgctgatctcccataatgaagaccaggagccaacatcgctccagcccgcatccatcggcaccacaacagcatctgccgtacgttccatgaccgcgtaatccaccgactcttccgggcaggcgagaaacgcttcttcatccacgcgaataaaattgagatccggatcgacggcgctcatcgctttttcacaggcatcgaggatatccgggcgatattttttcagttcttcgagatagcgtccggcgcggaacaggaacataccgctgttccagtaatattcgccgcttgccacataggcctgagcggtttccagattcggtttttcgacaaactgcgccacttcaaaggccaccatatcctgctcacccgcagacacttcaccgcgacgaatatagccataaccggtttctggtagatccggcacaatgccgaaggtcaccagcttgcccgcttcggcatatggcatggcattacgcacggcggcacggaacgcgtcttcatcggcaatcacatgatccgccgccaataccagcattaacgggtcgctctccgggctatgacgttttgccgccagcgccgccagcgcaatggcaggtgccgtgtttcgccctgccggttcgagaataatgttctcggtaagtttgttcagttgacgcagctgttccgcgacaataaagcggtgctgctcattgcaaatcaccaccgggctttcgcactccacgccgttcaggcggcagatggtggtttgcagcatggtgagatcgcctttcaggcataaaaactgcttgggataaagtacgcgggaaagcggccataagcggctaccggagccacctgccatcacaactggatagagtttcgactgcgccataattatccccgaatatcatttataaattgacgtaacacgttctctttatcgagcgtgcgttcggcatattcacgtgccaccgtgttgtgtttgggcagcaggagcgcctgacggatccccgccaccagcgcctcgaccgattccggttcaacgcaaaccgcaatgcccggaaaggtttcgcaaagctgccccagttctgtgtaggcttcagcagtaatcaccgcgttaccgcctactgccagaatattggtcagtttcgacggcaatacggcatctgccgcgccgcgtttttgcaccaccagatggcaatcgcccatcttcagcagtgcgggtaaagcgtcatacgattgcagcgggaaaaattgcatgttgcgcagtccacgctgctgcgccattttttccagccgcgctttgccgccgccctgcccgacaatggcaaaaatcagcggttcatcgcgcagacgatcggcagcttcaataacgttttccagcccctgcttttcaccaatattgccggagtaaagaatgatttttttgttatccggcaggtcaagctggttacgaagggcatcaacatcggcatctgcaacatgctgaaaacgggcaatttccgaccagttggggaagaagatgacgttttccgccgccacgcctttttcgatggctttattcatcatcgaacgcgaaatcgtggagacgttatcgacgttatgcagtccgctacgttcgaacgccgttgccagctgtgccactttgccgcctttgccttttccggcaaggcccagccccagcatggcgtccacttcgtaatcctgaatatgcagcacggtacgcgcaccagagagtttcgccagcaggcgcattcccggcgcgcaaaacagcgttggcaccacgccaataatgcgatccggcttccagcgacgttgcgccatcagcggaaagaaactgctgacggcaaaactgcccagatgcaacaggcgtttcagggtgctcggctgttttggcacatacagcgggcagcgccacaccgtggcggccccctcttctcgtttgtagcgccaggcggaatagttctcgcccacctgccattgcgggtagtaaggcggtgcggtaatgacccgcacctcatgaccttgtgccgccagccattccaccatctcgccggtgtatttgccgatgccggttaactccggcgagtagttaatgccgtagaccagtattttcataatccgggtactccggtacgcttctcagcgagaaaataggcgcggctgttagcatgaacattatcactggcgagcagcgcgtccgacgtcagccagcggtaatcgtcatgctgctcatccggcagtaacagctcttcttccgatactctgaagcgaaaaccgagcaccacatagtgagtggtgaaatccgtgccagagaagttatcgtcataaaagtgctgccagacaccgtaaaactggcctgctgttatcggcaaacgcagccccagttccgccatcgtcagccgctcaaatgcggcttccagcgtttcgtctttctgcacgcgccctcccggcacaaaccagtaaccctgcgccgggcggttggttcttttgccaagcagaaactcgccgcgactgttctcgacaataaagtcgagagagacaagcggagtggagcgcactaccgtggcaaagtcttcctgacgtaaaaacatcattacccccgaaagcggtcttgattctcaaggaaccactggtaagtgctggcaagccccgcttccagtgagatttcgtgataccagccaagctgatgcaggcgcgtcacatccagcagtttgcgcggcgtgccatccggtttgctggcatcaaaaaccacccggcctttgtaacccaccactttggcgatggtttgcgccagctcgcggatagtgcagtcaacgcccgtgccgacgttaatgtgcgacaacatcggctgggtgttctccagccagacttcatgcgccagctccatgacatgaatgctcgccgccgccatatcatcgacgtgcagaaattcgcgcatcggtgtaccgctgccccataccaccacgtccggcgcattctgtgccgtcgcctcgtggaagcgacgcagcaatgctgggatcacatgcgaattactcgggtggaagttgtcgtgtggcccgtacaggttggtcggcatgactgagcggtaatcgcgtccgtactggcggttgtatgattcgcacagtttgatcccggcgattttggcaatagcataaggctcgttagtcggctccagcgtgccctgcaacaactcgctttctgccatcggctgttttgccagtttcgggtagatgcaggacgatccgagaaacagcagtttgttcacgtcgttctgatgcgcggcgtgaatgatgttgctctcaatcatcatgttctggtagatgaaatccgccggataggtgttgttggcaacaatgccgcccactttcgccgccgccagatagacctggtcaatacgttcgctggcaaagaaatcatgcacggcgcggctgtccagcaggttcagctcgtcgcgggtgcgtaataccagttccacatcaccgcgctgttcgagctgccgcctgatggcggaaccgaccatcccgcgatgaccagcaataaaaactcgttgtttactcatgcttatgactccagcgcgatcgccacgtcgtagccgtgagatttcagcagagagtgttttttcgccgcttcgaggtcattagccaccatttcagacaccatctctctgagggtgatttccggtttccagcccagtttttcgtgcgctttggtcgggtcgccgagcagcgtttcaacttcagccggacggaagtaacgcgggtcaacagcgataatcacatcacccggtttaacgcccggcgcgtcatgcccggtgacggaaaccacaatgcccttctcttcaacgcccgtgccttcaaagcgcagtttgatgcccagctgtgctgccgccatttccacgaactgacgcacggagtactgaacgccggtcgcgataacgaaatcttccggctgttcctgctgcagcatcatccactgcatttttacgtagtctttggcgtggccccagtcacgcagggaatccatattgccgaggtacaggcacgactccagcccctgggcgatgttggcgattgcgcgggtgattttgcgggtaacgaaggtttcgccgcggcgcggggattcatggttgaagagaattccgttacaggcgtacatgccgtaggattcacggtagttaacggtgatccagtaggcgtacagtttggcgaccgcatacggagatcgcgggtagaacggcgtggtctctttctgcggaatttcctgcaccagaccatacagttcagaggtggaagcctgatagaaacgagttttcttttccagaccgaggaagcggatcgcctccagcaggcgcagcgtacccatcgcgtcgacgtcagcggtatattctggtgactcaaaagagaccgcaacgtggctcattgcgcccaggttgtacacttcatccggctgtacttcacgcaaaatgcgcgtcaggttagaggtatcactcaggtcgccataatgcagatggaatttcgggttgcaggtgtgcggatcctgataaatgtgatccacgcgctcggtgttgaatgacgatgcgcgacgcttaataccatgcacctcgtaacctttttccagcagaaactctgccaggtaagaaccgtcttgtccggttacaccggtgatgagagcgacttttgacatgtattattcctctgtatttttgaatttattcagtttcaacgcgttcgcgtatcaccactgcgggattcccccggcaaaccacatttgccggaagcgatttaaaaacactgcttcgtgcacccacgacggtgccgtcgccgattgtgacgcctggggcaacaaagacatcggttgccagccagcatttctcgccaatcacaataggcgtggcgttaatggtgaaatgttgacttgcatggtcgtggctaccggtgcataaataacttttttgcgatatcaccgaatgtgcgccaatggttatttcaccgagggtatataaattgacgtcatcgccgacccacgcgtaatcacctaaggttaatttccacggataggtaatttttactgacggacgaataactacgttttttcctatttttgctccgaataaacgtaataaaaaagcccgccagcgatacaatacttgtggcgaccaggcaaatattgttgcctgtactgcccaccataattgcactttaatagcgttgccgccccggaaccctttcggcaccgagaaaccgcttaaatcttgcattggttttccttatattcagactttgttatataaggctttcgtctttgaggtagtacgttggcgtaaatgccaggataattcagcccaaaagccaggcacatgtaatatttgtcgttggacttttttcgcgtcagcacacaattccatattattggtggtagataccccacccatggaaaattcagacaccaggccattgagttttttaaatgcataaccggctttatacattttggctgccagcgcgtagtcggaagaaactttatattccaggtcataacgccattttttcaagccggatacagggaaaaatatcgcctgatgactggcgggcaggctgtgataaatataccagcccggtttggcgctacgtttaattttatgcccgtcgccaaaatccagcagcgcatcgccggtgatcatcacgttatctttttgcatttttaacttacggacaaaatttgcggcattctgatgaaaaatatcgcccgaattgagaaacaacgcgaacttgccttgtgccatcgcaatgcctttgttcatggcgtcgtagataccgttatctggctcgctgacaaagcgtaggttaaagataccattgagattttccagatactcacgggtgccgtcgttggaaccgccatcgacaacaatccattcgaagctgatatcttccacctgcgccagatgcgccagcgaggcatgtgttttgactatcccttcgaggttacgaaacgcgacagtgattatgctaagcaacatgttcttattcttacctcgtaatatttaacgcttttcgcaaaataaacggacagacgattaaaaatgcatattccgggctaaatatcgaaccggtaaaaaacagcgataccggagtaaaaagatataattgcacgcgaaaattgcggttatcaccaaaagcgttgatcatcatttttatcactttccccatgtaccacagtgataaaaacaccgcgaaccaggaaaaataaataatcagcagatacaaaccattgtctatggtttttccgacatccgcaccgttaaatattccgaatgatgcgacatattcataaagtgagccaaatctgactacaccgtcaatatgggtcaaagaataaccgaccatcaccagcggaccgacaatacgataatatgatgacgatccttccgtacctaaatcgcccagacgggtggaaatataaggaaacgcgattaccacaccaaccaggaatacagccagagaaatcaatgctaacggtaactttttcttaatcgcctctttattcagatattgaaatgcccactccagcaaataaaacaggataaaggtcataacccctgaaaacgatccggataatattatccctgcgagaatcatagcatctgttttaggcgttttgataccaaactgtttgatgctgagccaaattgagattaatgccagagcgaaaaatgccggttcgaaataaagtgctgtcgtgcgcttgccgccgaatttaatgaaattcagcacatagctgttgctgtaaatcagatatttcgaaatcgactccataatactgctgccaccggtgaggataatttgtgccatctccaccgccgccagcgccaccaccagcccgaccaccagataaaagaaacgtaatatcttgcgatggttgtgtggcgaaattgttttaaaacgaatactccacaccatgccaataatgatcacaatatagacaaacagcatagttgaagtgacgtatttactggcatccagcgactgaccaaacagatagttaaacgccgtgagtcccgcgccaatccctaaggcaatcatcaattttttaacgctgatgcgttctaaaaacagcagtaacaagacaggtaaaaaagtgacgatggtgatggggaaactttcgccaagctgggcgattttgacgttaaccagcagataaatcagcggcagcaacaggtagctacagattctgatagaagttgacatactcctccagcatctgttgtccactgtaggcggcgcggctgcgttggctgaactcagccagcgtggtaccaaatatcgcctgcgcgatttccggtttgcttaactgcaccagttgcagcacctcttcttcgctgacggttttaccgccggatttttgcaacacttcccgcgccgcatcgctatgggtggcaatcaccggcacgccaatcgatagcgcctcacacaaaatcagcgggtagttatcgacgcgagaactgaataccagcgcatccatctgattgagcgcgctcatcagcttacgtttgtcggtttcaaagccgtgattaaccacgttgccagcggtgaacggcgagaacttaccaaaggtatgcagttcaattttgtcgcccagcgccatcatctcgcgtaccagttgctggttagttttgccgtcgtaacgcagatcatgcgccaccaccgcgattttcggcttgccctgggtttcgcgcaccggaggcaagtccgccagaatcgcttcagttgccatatcaatgccattattgataatccggcaacgccctggaccgtacaggctattgaaagcgtcagccacatgctggctgggggaaataaactgacagcccagcgccagcatctcacggaataactggcgtttgcccgccaccagttggtgtgcgcgatcaatcttcaccggcggatagttatttaaggtcgggcatttctggcagcctgttttccagccttcgcaaccgtcggtaaaggcgcagcgtccggtaacactccagtggtcgtgcagcgtccagaccagagtgacgtccggtttatggtttttcactttttcgcaaaagcgcaccacgctcttaagatttagccagtagctgtgcagcacatgaaaatgcaggaccaccggacccgctgtgcgagtaatggtgcgatataactcattgaaattgccaaacagatcgcgattaaacagacgaaacagagcaatattcgccatcgcggtcatccgcggcgtatgtttgatgacctgcggatagttctgatggctgacgctctctttgccgcctttgccgtaaccgtagacaaaatgtgacgccagcccctgttgcagcgcacgctggtggagatctaacgccacacctgctgccccgccttccgccagtcgcacattaaattgcaaaatattcatttaattaccttcactcgcgctttttctcccaccaccagcgcgttgtccgggacagagtcgagcaccacgctgcccgcgcccacggtgacgttgttaccaagcgtgatatcaccaagaataatgacgttggcaccgagttcgacgccgttgccaatgtgtggacatgccatgttatcggcaccacgattgccgatagtgacgccgtggcgaatggtaaaatcatcccccgctaccacgtttttattgatcacgacggcgtaaccgtgatggatagtaaagcggcggccaatggtcgcggcagcctggatttcataaccgaaaaagcattcggtgataatgcgatacagcaccagcagcggggccgcccacagattgttgaggacgttctttttgcgccacaccgaacaaaaatgagcaacacgataggcaagaaccatgcagcacgggcgtaaactccagctgttggcgcgcagatcttccagcatctttagcgcccccgaataccatcagccagacgtttgccgttacgcaccgacagcagcgtcagcaaagtgcgccaggtcatacgtttattgcggatctggtagagggtaaacagctgatattttttgctggcgcggtcgaatttgtctttgtgcttgcggtaaaagtggaagtacccggagaattttttcggtgacgaggtgatctgcatttcaccgtgattgatatgcaggatctgcgtcgcctcttctactttccacggttcgccgtactccaccaccatccgcaggaagatgtcgtaatcctgtgccgctttcagttcggtatcgaacaaacactctttgaaacgccatgcccaggtaaagacctggttgccaatgatattgcgtttgtagaacaggcggcgtgaatacggcgatttgggatacagcggcaagcttgccggttgggaatagacttcgccctggcaaacgtagtcgttagcgtacaaaaaggcgtgtgtgaccagttgctgtttatgggcgaggaagacgctcagacggttgggtgtccattcgtcatcgtcatcaatcccggtgatatattccccttgcgccagcataatcgcctggttacgtaccgcgcacgccccgctgttaatgtcgttgtgaatgtaagtgatacgcggatcgttgagggcggtgacgtactgttgcagttgttcccaggaggtggagcaatcatccacgatgatcatctcccagttgctgtagtcctggcgcaaaaccgattttattgcccgaatcgccagttgttggcggttccaggtcggcatatagattgagatcagcggattgtttttcataggttgttctcccggcttatgagctggtttgcttgccggatgcggcgtgaacgccttatccggcctacggggcggtgcgaatgcaggcgtcgttatttcgcatccgacttatattcgtattcgtaatagccataatcctgatacgcgctggcgcggcggaagatggagttcagaatcacccctttcaccggaataccgttttgctcaaagcggctcagactggtttccacttctttcaatgtgttgaccgcataacgcgccaccattaacgtggttccgacatgacgaccaacaattgccgcatcggtcactgccagaatcggcggcgtatcaatcaacaccaggtcatagtttttactcgcccagttcaccagttcggcaaagcgttcgctcatcaacagttcagaaggatttggcggcacctgaccgcgcgggatcaggtcaaatttggcaatagaggtcggtttagcagcggtagtaatatcgccctgaccaatcagaatttccgacaggccattaacgttattagtgcccaacagctcgtgggtgtagcctttgcgcatatcgcagtcgatcaacaacacgcgtttattggtctggctgatcaccgccgccaggttggcgcagacaaaggttttaccaattgacgggctaaccccggtcatcatcaacacattgttctgtgcctgcatcatcgcgaagtgcaaactggtacgcagactacggatggcttcaatcgccagatcggttggattccccaccgccagtagctggctctgtttatagcgtttaatccctttgatggttttgacgctatcacgcgctttctgccattccgacagcgggatgctggcatagacgctaataccgtgttcttccagtacttgcgggctttcaatgccgcgattaaacaacgagcgcagcagcacacccacgatagaaagcatcaggccaaggataatcgcgccgaggataatcagccctttcttcggtttcagcacgccaggctgagtgattgccgggtcaacaatgcgcacatcgccgacggtgctggcctcggtgattttcagctcctgctctttattcagcagttgcatatagacctgctgaccagactcgacatcgcgggtcagacggacaatctcctgctgggttttcggcatcgccgttacgcgaccgttaagtttggctttttcgtcttccagcgcctgacgtttctccagcagcgtgcggtacgccgggtgaactttggtgtacagcttggagatttccgcctctttaaaggtcagttcgttcaactgcgcatcgatgttcaccatcgaatcgagcaccgcttttgcttccagcggcagatcaacagaatctttatcctgacggaaggcattcagtttgttttcggcaacatccaagcggctacgtacttccggtaactgttgcgcgaggaaggcgaggcttttcgacgcttccgccgatttgcgctcaatattttgttcctgatagttacgggcgatgctgttaagaatgtcgcggatctgttcacgatcttcaccggtataagtcaggctcaaaacgccagcgtctttgccgttctccgttaccgtcaggctgttttgcagttggttgatcatccccagcgtggagtatttggtgacggtaaactcactgcccgggctggcgtgaatggcttcaaccatcagcgtgacgccttcttttttcagcatctggcccgcttgcccccgggcgctaaagccgccgtcgctgctcagggtgtagtttttgttgtccagcacattaagcgtaaacacctgatccgccatctctttcgggcggttaaaggtggtcactttcaccgtctcgttctgacgtcccatcaggcgatcccagcccgcaccgaaaatcgggaacgtgtttttgctcactgcaatatcgaggtcgagatcgtccaccgttttaccaagcaccagacgcgaacgaatcaactggatctcggcgtccgatgcaggcggtttgttggctaatgccgaaccaatgtcctgcactaacgaattgccgctgttttgctcgatttgtaccagtgcgtcggcactataaatcggcgtggcgaagaaggtgtaaaccacggcacagagggcgaatacggtggtgatgccaatcacccaccagcgcgcttcaatgacggtgccgaccaggcgaccaatatcgatttcatcactgcccgttaccggagcggcatgttgttttactttttctgtcattcttatacctgctctgcgttcaatgcctgcgcccactggcgggcagaccgttcaagtaatgtgtacaccgctgcaaacgtttcccggcttttgcgatacggatcggggatttcacattcgttatcccagtgaccaaacagcatcactttgccgcgcatctccggtgccatctcgcataagcgttcgatatggcgcttttccatggtcaaaatcaggtcgtagttgcgacacagacggcggctgatttgacgggcacagtgaccttccagagacagttgatgttctgcggcgacgctgatagcggtaggatcagcgcccttaccgaccagcgcgccgagtccagcggactccactttcagctccgggtgataacgttgcagtaagcgttccgccgtcggggaacggcaaatattgccgacacagacaactaagatgttgttaaacatgacgattaccagttatgaatgtcgctggctgtatccgtcatgtaacggacaccgctaatagttggcagcaactgattgatcagacggttccagcgggaaaccggggcggtggtgacatacaccacgtcataaggttgcaggcggaattctgtcgccatcaccagcgacgtggcatcggacatatccagctggtagatattggcaatcttgccgttacgcccgccctcgcctttcagcggacgaatgacaaagatgccgctggcgttggaggtggtcatgtcgatgccttcagcattgcccagggcttcagtcagggtcatgccgctaaagtccattttcagggtgctctgtttcttcacttcacccatcacaaatactttcagatcatcattacgtggcacgtagagaatatcgccggggtaaagcaggcgattctggttgaggtcgccgttttgcatcagcgcctgcaaagaaatgcgctcttcacgaccattgtgtgttagcaccacgttgcgccagtcagcggtgtcggtcaggccacctgcggcgttgatggcgtcgagaatagtcagtggcacgttggtgatcgcctgttgaccggatttattcacctgaccggagatataggccttttgtgagcggaaggcggcgatattaacgtccacctgcgggtcagcgatgtacgtcgctaagcgcccggtaatatcactgcggatttcagcgagcgttttcccgactacgtggaccttgccgatatacgggtaaaacatagtgccgtcaggctgtacccagttgccggtgtcgctggagctgcggtactgaccggctggcgtggtgagttccgggtgatcccagacggtgacattaagaacgtcccccggcccgacgcgatactggtaattcgcgatctcactttccagcgtcatattggggcgcgctacattcgggcgtgggcgtaattggtcaatcaggcgcggggtcagcggataaacattcaccattttgtcgagatcgaaatcagcgtcctgctgtttgatgacgtctttgcccatcgtcgacatattgctgcccggaagtactgtgcaaccgcttatcaaggttactgacaccaataatggcatcaatttcattttggatttcatcattgtttatttatcactttggcagagtaattatcctgtgcactattaatagcaatgtcgccatgcacatttaccttgcagttaattgaataaaaatttaactggcatcagtcctaaaaaaattgatttcatccgcaggctattgacagaataattcagactggtctttcaggcatccagacacgctaccgcccctggctttttagctaccaatacactgatttagtttaatttttcacaccctctcagcatgcagtcgttgatgagaaagggttattacggaaattaacttccgaatataaggtgacattatggtaattgaatattggctttccaataatgcaggaggaagtgttacagctaacggaatagcaggcaagataacaattcggtaattggctatttttaagaattatattaagtgtcattcaatatggtttttaggagtttctttaggttgacaatatttaatatagtgtctccacatgcgatatttcttaaataatgttttattattaccacttttaattcagggataatgtgaggttattaccctcaaataatatgagataaatagtgctgcaacattgcatttttgccccgatttatccatgatcgaattgtgacatttgtcatacaacgaataggttttgtacttactatggaatggattgccgatccgtctatctgggccgggttaatcacgctgattgtgatcgaactggtcctcggcattgataacctggtctttattgccatcctcgccgaaaaactaccgccgaagcagcgtgaccgcgcacgggttaccgggctgctgctggcaatgttaatgcgcctgttactgctggcgtcaatctcctggctggtcaccctgactcaaccgctgttcagcttccgctcgtttacctttagcgcccgcgacttaatcatgctgtttggtggtttcttcctgttgttcaaagccacgatggagctgaacgaacggctggaagggaaagacagcaataatcccacacaacgcaaaggtgcgaagttctggggcgtggtgacgcaaattgtggtactggacgccattttctcactcgactcagtgattaccgccgtcgggatggtcgaccatttactggtcatgatggccgccgtggttatcgctatcagcctgatgttgatggccagcaagccgttaacgcaatttgttaacagtcacccgacgatcgttattctctgcttaagcttcctgttgatgattggctttagcctggtggcagaaggtttcggcttcgtcattccgaaaggctacctgtacgctgccattggtttctcggtgatgatcgaggcgctcaatcagttggctatctttaaccggcgacgttttctttccgctaaccagacgctgcgccagcggactaccgaagcggtaatgcgcctgcttagcgggcaaaaagaagatgcggaactggacgccgaaaccgcgtccatgctggtggatcatggtaaccagcagatctttaatccgcaggaacggcggatgattgagcgggtacttaatcttaaccagcgtaccgtcagcagcattatgacgtcgcgccacgatattgagcatatcgatctcaacgcgccggaagaagaaatccgccagttgctggagcgaaatcagcatacgcggctggtggttaccgacggtgatgacgcagaagatttgctcggtgttgttcacgttatcgacctgctacaacagtctctgcgcggcgaaccgctcaacctgcgggtgttgattcgccagccgctggtgttcccggaaaccttgccgttgttacctgccctggagcagttccgtaatgcccgcacgcactttgcttttgtggtggatgagtttggctcggtggaagggattgtgacattaagtgacgtcactgaaaccattgccggtaacttaccgaacgaagtggaagagatcgacgcccgccatgatattcagaagaatgcggacggttcctggacggcgaatggtcatatgccgctggaggatctggtgcaatatgtgccgctgccgctggatgaaaaacgtgaatatcacaccattgccgggctgttgatggagtatttgcagcgtattccaaaacctggcgaagaagttcaggtgggggattatttgcttaaaacgttgcaggtagaaagccatcgcgtgcagaaggtgcagattataccgctgcgtaaggatggcgagatggagtacgaggtgtgatggtatcggtcattttacccaatagccgaaaggaataagatgagggaaccgcgccatcggcgatttaccgccgggagcccgggttgccagggtggtggagattgagccaccctggcacgttcaccggcttgagcgttccatagtagcgaggaacatcaagtgaacggaacagccttcgatcttacatattcagaatataatgatgccgccacgaacgcctgatgcgacgctttacgcgtcttatcaggcctacaggactggtcacctggtaacctacatcttctccagcaacttcttcacatctttgccattacgggaatctttattccgctcggcccagtcattcaggcgacgtttcgcttcgtcctgtagatgtttgcgcagtaactgatccacttgcaggctgtaattgagttgctgccagttgccataaacccgcagcggtactggcgtttctttcaggaaatcaatcagtttgctttccccgttccagccacccacgacccgaatatcaaactgggtgtcgcaggtttgatctgccagattcaacatgccttcccctgtcagcgccagcacaggcgattgaccttgcatgtcgtttaacgtcacgacgccatccttcaacgtcaaatcggtggtaaagcggtcaagccgcgtcacgttatcaaagttttcagcggccttcacatcaccgccattacgctctaccgcttgctgaatcatctgctggaagttcatcccttccatgcgcgtgtcggtcatttcgacatgtgcctgtccttgccagttgtggcggaatgcgtcggcatctatgtcagcaccggagaaatcaccagccagtgacatttttccggtcaacgaaatcggatagttaaacgccttcagaatggtaccaatctcaacgttttccagccgtggctggaagtttatccgcggatttattgatgtcgcgtccagcgtgcccggcagtgaaacctgtccaccgttaagtttgccctgcagttgagtaatttccagcaaacccgacttgttggtcatttgcgtggcaacatctgtaaaattcattccgcgccagcgcacgttactggcctgcaacaaaatatcagccgtaaagccttgcagtccctgataggccggttcatcaatacgcgaagaaatgaccgggcgcggcaacgttgattggctctgcccctgctgcgcggcaccgttttcaccattcgcggtttcattaagcgggatgaggttgtcaagattcagttgcgggaattgcagcctcagctgccattccggtttctctgtcagcgtaacctgtgcttgcccgcttagcgtactatcattggcggtcaaactaatttggttaaatgaaaggcgtttatgtgactcctgccactgggcctggaaactcccctgcccctgaataccttgttttggtaaatcggcaccctgcaactgccagttaatttgttcaatagccgccgttaaatcatgcggataatcagaagcatctaccgtaccgttaagggatatcgtgagatcgcgctgatcgcgattaacccgcccggagaactcaaatgaaccacgatgttggggatcttgttccatttgcaggcgaatattgcggattgtcacctgctcgtcatcttcatgctggaacaccagcacgctgtccgccaccttaagactggatatatcaaacgaccatccgcgatcgtctgacagatccggcaaggtattgtcgcgcggtgcaaccggagcgtcttcactgcgcaccgcttccgtctgcggcgtcagttggatcactgccccttttagcatcacctgcttaacgctcagttgatgactcagtagtggtaaaagcgccacgtccagacgcatgttgtcggcgcgaaccagtggctggcttgcgccctgggcggtgagagacattcgcccggagaggatactaagctgcggccagacgtgccaacgcagtggcccgtcgagctgcaattgataaccgctacgtgcagcaacttgcttgaccatatagtcgcggaaatcattcggattcaccagcaacactaacgcagataacccggccaccagcacgaccaggagtatcatcagcgtcgtcagaaatcgtctcatggtatcctcaatgggcctgaattagtctttatcgattcggctggctaccgcgccctgctggttgcgatatttcgcatcttcacggcggttgtaaggtcgcaccgccgggccggaaagcggctcaaagctcagcgcaccaattaacatgcccggacgcagcgccagcggcagcttaccggagttgtagaactccagcacaatgcaaccagaccagcccggatcgatgcggtgcgcggtgacgtgcaccatcagccccagacgcgccagtgaggaacgcccgtccagccagcccaccagatcggctggcagcgtcaccgactccagcgtcaccgccagcgccagctctcctgggtgaagatagaacgcctcgccctcgtcgagaacgatctcatcgctcatcacgcggtcaagcgcggcgctcacttcatctttgggaccgctcagatcgataaacgctgccgtgtgaccacggaaggtacgaaatttattgcccaggcgtacatccaccgtcgcgccgttaatacgctccactggcggacgtgggttgatcgacaaacggccttcatcaagccaggcttcaatatctcggtcacacagacgcatggcattttctcctttcgcgcatcactcccttaacgccaattacgtcaagggcatactaggttatcactgaacggtacacaatttatcaagcttattcaaagaactgacttattttcgctttcaatatatcgatcgcgatgcggtttttcccgccgcgcggcacgataatgtccgcatattgtttagaaggctcaatgaattgcaggaacatcgggcgcacggttttttgatattgcgccatcactgaatccattgaacgcccacgctcgttaacgtcacgcttgatgcggcgcatcaggcagatatccagcggggtatcaacgaaaatggagaagttaagttcgtcacgcaaacgcgcatccgtcagcaacaaaatgccttcgagaatgatgaccttcttcggctcaaccgtcaccgtttctttcatacgcgtatgttcaacatagctgtaaaccggcaggtcaattgccgagccgcgtttcaacgcttgtaaatgctcaagcagcagactgtgatccatcgcgctgggatggtcgtagttggtcttaacgcgttcttccatcgacagatggctttgatctttgtaatagcagtcttcgggaattacgccgatgtgttcatcaccgacttgctcacgcaattcacgataaagggtactggcaataagactcttgccggaagccgatgcgccagcgataccgataatgacgcactgatgagactgatcagtcatatatttagcgacctgattaacctggatgttaggaagggggcgacgaagcgccaaacgcggcaattatagggatttcatccgtctgataccagtcgaatagcgttgccgcgcgctcagagttaattgttgacaaagaattcccgggggcaaattacgttgatcagttttatgtaaggtaaaaaatgttaaacgcagttgcgcaaattatccgcctttacgtcactttatgagcaattcgcatataaaatgtaaaacttttgtactagcataaacacagaaacgaatactggcgaccaggtcttgcggataaagcggtaatgagcaaacaatcacagcatgtattaattgccctgccccacccgctgcttcacctggtcagtttaggtttagtctcgtttatctttacccttttctcgcttgagctttcgcagtttggcacccaactcgccccactgtggttcccgacgtccatcatgatggtggcgttttatcgccatgccgggcgcatgtggccgggaattgcgctgagctgttcgctgggaaatatcgccgcatccatcctgcttttttccaccagctcgctgaacatgacctggacgaccatcaatattgttgaagccgtggtcggggcagtgctgctacgtaaattgctgccgtggtataaccccttgcaaaatctggctgactggctgcgtctggcactcggcagcgccattgttccgcctctgttggggggtgttctggttgtcctgctgacgcccggagacgatcctctcagggcatttttgatatgggtactgtcagaatccatcggcgctctggcactggtgccgctgggattgttatttaaaccacactatctgctgcgccatcgcaacccacggttgctttttgagtcgctgctcacgttagccatcacactgacgttaagctggctttcgatgctgtatctgccgtggccttttactttcattattgtgctgttgatgtggagcgccgtgcgtctgccacgaatggaagcctttttgatcttccttaccacggtgatgatggtgtcgctgatgatggccgcggatccctccctgcttgctacgccgcgtacgtacctgatgagccatatgccgtggctaccgtttttgctgatcctgctgcccgccaacatcatgaccatggtgatgtatgcctttcgtgcggaacgcaaacacatttccgaaagcgaaacccactttcggaacgcgatggaatattccgctatcggtatggcgttagtgggcaccgagggacaatggctgcaaaccaacaaagcgctctgccagtttctcgggtacagtcaggaagagctgcgcggactcacctttcagcaactgacctggccggaggatctcaataaagatctccaacaggttgaaaagctgataagcggtgaaataaacacctattcaatggaaaaacgctactacaaccgcaatggcgatgttgtctgggcgttgcttgccgtctcactggtgcgccacacggatggcacgccgctctattttatcgctcagattgaagacattaacgagctaaaacgcaccgaacaggtcaatcagcaactgatggagcgcatcactctggctaacgaagcgggcgggattggcatctgggagtgggagttgaagccgaatatttttagctgggataagcggatgttcgagctgtatgaaattcctccacatatcaaaccgaactggcaggtgtggtacgagtgcgtgctgccggaagatcgccagcatgccgaaaaagtgattcgtgattcgttgcaatcacgctcgccctttaaactggaatttcgcattaccgtaaaagacggtattcgccatatccgcgccctcgccaaccgggtactgaataaagaaggcgaagtcgaacgtctcctcggcatcaatatggatatgaccgaagtgaaacagcttaacgaggcattgtttcaggaaaaagagcgcctgcacattacgcttgattccatcggtgaagccgtggtctgtattgatatggcgatgaaaattacctttatgaatccagtggcggagaagatgagcggctggacgcaggaagaagcgttaggtgttccgctcctgacggtgttgcatattacttttggcgacaacggaccattaatggagaacatttacagtgccgacacctcacgttccgcgatcgagcaagatgtggtgttgcactgtcggagcggcggcagttacgacgtgcattacagtattacgccgttaagtactctggacggcagcaatattggttcggttctggtgattcaggacgttaccgaatcacgcaaaatgctgcgccagctgagctacagcgcctcccatgatgcactgacgcatctcgccaaccgcgccagttttgagaaacaactgcgtatcctgctgcaaacggtaaacagtacacatcagcgacatgccctggtgtttatcgatcttgatcgctttaaagcggtgaatgacagcgccgggcatgcggcgggtgacgctttgctgcgcgaactggcgtcgttaatgctgagtatgctgcgttccagcgacgtgctggcgcgactcggtggggatgaatttggtctgctgctaccagactgtaatgttgaaagcgcgcgttttatcgctacacgcattatcagtgccgtgaatgactatcactttatatgggaaggccgtgtgcatcgggtaggtgccagtgccgggattaccttgattgatgacaacaatcatcaggcggcagaagtgatgtcgcaggctgatatcgcctgttatgcctccaaaaatggtggccggggccgggtgacggtttacgaaccgcagcaagctgccgcacatagcgaacgggcggcgatgtcgcttgatgaacagtggcggatgattaaagagaatcagttgatgatgctcgcccacggtgtcgcttcgccacggatcccggaagcgcgtaatttgtggctgatttcacttaagctctggagttgcgaaggcgagattattgatgaacaaacatttcgtcgtagcttcagcgatccggcgcttagccatgctcttgaccgccgggtattccacgaatttttccagcaggccgcaaaagcggttgccagtaaaggcataagcatctccctccccctttccgttgccggtttgagtagcgccacgctggtgaatgatctgcttgagcagctggaaaatagccctctaccaccacggttattacatctgattattccggctgaagcgattttagatcacgcagaaagcgtgcaaaaactgcggctggcgggatgtcggatagtgctcagccaggtgggccgcgatctgcaaatcttcaactcgctgaaagcgaatatggcagattacctgctacttgatggtgagttatgcgccaacgtgcagggtaatttgatggatgagatgctgattacgattattcaggggcacgctcagcgactcgggatgaaaaccatcgccgggccagtcgttttacccttagtgatggatacgctttctggcatcggcgtcgatctgatttatggtgaggtgattgccgatgcccaaccgctggatttgctggtgaatagtagttatttcgcgattaactgaggcgtgcttccccatcgcctgatgcgacgctaacgcgtcttatcatgcctacaaatcgctcattccccaggccggataaggcgctcgcaccgcatccggcgaccaacgtcatgcttcgtctggttgccagccttccgtataccagatatgcaacagcgcataagaacgccagggcttccagcgctcggcataacggcggatttgcgccggtgtcattcccggaaatcgctgtttaatcagataatcatccggcaggaaaacatctttcgcctgccagccacgcaaagcaaaataattcgccgtccagcgcccgatacccggaaaagtttgcagcgttttcatcgcctgctccacatcgcccggtattgtcattggtaaggtgccctccagcgccgcatttgccagatgaatcagcgcctctgcccgtttcaacggcatacctaacgcttttaatgcctgcgggtctgctgctgccagccgctgaggcgtcgggaagcagatatactccggaaaatcatccagccgttcgccataaagctgtgccactctggcggtcaattttgccgccatcgccacgctcaccagttggcctaaaatcgcccgcacgccctgctcaaaagcatcaacacagccgggtaaacgcaatccgggccgcgccgcgcctaacctgcccaacgcaccgttaacaatttgtgggttacattgcagatcaaacaggcggctcattttcgccagacactctgcggcaacaggttctaaacctgcacttaaatttatgtgcagagtatggcgggctatatccggaatagcagtcaccacgccgcgatattcgcccaccgccagactacgggcataataactgtccgcgaccgtttccacactgctcaccgcacgggcggcgagaaatcccaacatccacgaccagtcatacggcggctgccagttcagggtatacatcgcatctccttattcatccgctttcagcataaacgttattcagacgctgcgctttgctttcatattccggttgtcgcgacggcaacatttcgctaaagtcacgccccttcttcaccggcatggggattatttcgtgtttattggttttgattacggtacagcaaactgttcagtggcggtcatgcgtgacggtaaaccgcatttgctaaaaatggaaaacgacagcacgctgctgccttcaatgctttgcgcgccaacgcgtgaagcggtaagcgaatggctgtaccgccatcatgatgttccggcagacgacgatgaaacgcaggcgctgttacgtcgggcgattcgttataaccgcgaagaagatatcgatgttacggcgaaaagcgtgcagttcggtctttcctcactggcacagtacattgatgatccagaagaagtgtggtttgtgaaatcaccaaaatcgttcctcggtgccagcggcttaaaaccgcagcaggtagcgctgtttgaggatctggtctgcgcaatgatgttgcacattcgccagcaggcgcaggcacagctgccagaagcgattactcaggcggtgattggtcgtccgatcaacttccaggggctgggcggtgatgaagcaaacacccaggcgcaagggattctggaacgcgcggcgaagcgtgccggattcagggacgtggtattccagtacgagccggtcgcggctgggctggattacgaagccaccttgcaggaagaaaaacgggtgctggtggtggatatcggcggtggtacgactgactgttcattgctgctgatggggccgcagtggcgttcgcgtctcgatcgtgaagccagcctgctgggtcacagtggttgccgtattggcggtaacgatctggatatcgcgctggcgtttaaaaacctgatgccactgctgggtatgggtggcgaaaccgaaaaaggcatcgccctgccgatcctgccgtggtggaatgcggttgccatcaacgacgtacctgcgcagagtgatttctacagtagtgccaacggtcgtctgcttaacgatctggtacgcgatgcccgcgaaccggaaaaagtggccctgttacagaaagtctggcgtcagcgtttaagctatcgcctggtgcgtagcgcagaagagtgcaaaattgctctttcaagcgtagcggaaacccgcgcctcactgccgtttatcagcaatgaactggctacgctgattagccagcgagggctggaaagcgccctcagccagccactgacgcggattctggaacaggtgcaactggccctggataacgcccaggaaaaaccggacgttatctacctgaccggcggtagcgcccgttctccgctgattaaaaaagcgctggcagaacagttgccgggcattccgattgcaggcggcgatgactttggctccgtcaccgccgggctggcacgctgggcggaagtggtgtttcgttaattgaaaaatggctcagcagcggcttaaatctgcctgcgcctgagccagtttttctgctgcctgacgtaacggttccatcaacggcatggtccgtgctggagcatgaaggcggaatcgctgcaactctgtcgcgccgactgtcaacgccgattccagccgatgtcgtttggcggtcattttcgccattaccgcttgtctgtctgctggcgttatcgcttcattcggcctgaacacaaaacggcgttcacagctcgctttccagtcgataaccgcctgggtcagatggtcgccaaaccctttcacttgcttaacgccacgacgggtaacatctgcggctgtttcaataccaaaagaccgtaacgccgctttacgcgcagggccaacgccgggaatagaggcaacatcaataaaaaatccctccagaaacttctgcttctgccgttcccttgcagtgtcatgaagtgctgccagagcgcgtttctcttcttccggtaacccgagaatttcgtccttcattttttcgagcatcgtccgtttggcgataaaaccttccaggccgcctacctgctggatctggcggactaaatggtcatagtccattttcgcacgattaaatgcctcacggcgttgctgaacttctgctttgtacgctttgcttgtcagactgccaataatccagatagccgccagcacaggaaccaaaataatataacgcggttctgcctgaaggccgcaaagcagcagcgataatgctgacagtgcgatctcaagcagaatgatgtattcgcgccgtaacaggcctaaaggaagcggcctgccagtcggttggaaatgatcgggtaatggcagttgcaatgctggcggtgctactgacgccatcaccatcgcccagactttcgccagcacaaaattcccgccggtggtaatgacctcttcgccgagatcaataaaatagataacaccttgattatccagcgcacaccacgggcagtcagtcaaatgagcggggtaaacatgcattgctgaaacgatacatttctttaactgttggcgtagagagtccagtgccgctacccacgctttagccgtcggacgcccggttgccacgccactttccgtgaatgcctgctgaaacatggcttcaacatcactcggtaacatcgatagcggaatagatcgtggcggcggttttaaaccacgtcgctgattatctgacgcgtaggcataacggaaatgggtaatatccgtctccagcgcattacccgcatcagagataagcggcacaccagaataaggatgccgcccaccaaacaagacgtgaaaaattagcaacgcaaggccaaaattatcgtgattttctgtgcgttcaaaaccgacaaatgatggcaaggtttgtagctctggcggcgtaaaatgcgacacgccgacttcgcataaatgcagtgtgccattggcgttaatttgaaaggagtcgctatcaatcagtaccactttgctgtcgcgacctaccataaaactgttctggtttacgtcacccacgacgtgcccgtgctcgtgaaccgtagcaaaagatgaagcaatattgcgcgcaacatagagtagaaaatcccacgcacaatgagggtaactctggcgacgatgtgccgggctatagatcatatgaatcggttctttaccagaaacttttggcatcataaaaccgataacttttccgcctcgtccaccgtgaagcgttgcctgcggccaggcgacataattcaacaactgcgcgtcagctgtcgcagccataaaggcaagtttgtcctgttttaaggcgggtggcggcgtgtgataaatcttggcgacgctatcgacaaactcctcgatatcataaaccgcgccttcaccacctttgcccagttcacggccaagagtggtcaattcacctgtcgatgtaaatacttttatatttgttttcataatatttcgcgggtagttatattatatttcaatgaataataacaactaaccattaaaattatttctatatggggaaaacccactcaagaataaaaatgataatgcaattttatcaggatacaattcaatttcggcctgataatgattaacttccacaggtttttgctaactttgactacaaagggattctggagaaaaaatgaaaaagatattacttatgttgagtctgctattttttactaccgcgggctttagtgaagtttcggatacgttagtgacgggaggttatgataaacaagcgatgtctgacgcgattaaacatgcgcggaaagaaaccgataaattcatcgaggttatgaataaaaaagatgccgatactttcgcagtcaaagccccgataaccgatcacggaagaaccgagcatttctggcttacggatgtcacttattctaacggcatgtttattggcgtaatcagcaatgaccctggtattgttacaaacgtagaatatggccaggagtggaaaatcaagaaagaagatatttcagactggatgtatacgcgcggggataaaatttacggcggttataccattgatcctttattggtcacctatccaaaagaagaagccgacgagctaagagcaaaattagttcgctaatcagccgttatatttattgtttaaactggcggttgaattgttgtcttcaaccgccatgagaaactcactctgcccacagcgccagtgccaacgttttatcatcatccgtacgctcgtttaccgccgggctggacaaaaactgctttaacaattcaggtaataaatcgagttgttcctgcgttgctgccgccagtccattgaaaaacggggtaaagaaaggcacatgaggagaattatccagcatatttaacgccagtcgctggataccatccgtaaatgctgcaactttgtgcgcacgcccagtgctggtgaaagtttccagtctggaaacggcatcttcgtcggtaatgaagtgcgtcatgttggcatattcacccgccatcggcgtgagaggcaattgcagaccgtgacccaaatctaccaccacgccgccatcgccaatctgcataatcaaggtgccgtcaggcgatgaaatcagtcccagaaatgtgcaggcaaaatcgcgaaccgctaattctttggcttccgcctcggcaaaaagtcgttgacgaatggtcagtaccatatttgtggcgaggacatcattaagccccaattccccgccctgcactttttgcgacatataagccatcgcttcattgacggcgagcatcgcgccttcgccaccctgcgagacactgcctgcgccatcagcgacaaataccgacaataatggctgctggtcatttaaccaggcaatctgcatctggcaggcatcctgacaaggcaagtccgcgctgatgtgcgacgttccaacggttgatgcatagaccagacgccagctcacactgacgtccagccttttggcgcttccagcacaacttccgttcccggcgtggagcgggaaaccgaacgcagcgaactggataaccagctaaacagttcacggaattgtaatccttgcagaggcaaaggctgacgaacgctaatttgtgccagcgtcttcatatccgccccctgaacaccgatggaaaagaaagcaaaccttttatcttcttccccccgaaacactttgttggctgcagcctgccactcatcggttggtgcaccatcggtaatcaggaaaatccacgggcgataatacgaaataccatttgcacgatactcacgtttccgctcctctaccatatccagggctttggtaatggccgcacccattggtgtatcgccctgggcaaacaggatgggcggaaaaaaattagcggcgctggtaaagggttgttccacatgcaccgggccgaacgtcacaatgccgagttccactctttttaaagccagcggatcagcaagcagttcatcacgaaaggtaaccaatccggcgttaagttcattaataggtctaccgttcatagaaccagaaacatccagcagcaaaatgcaggggcaacgtggttccgggttactggcaaaatcgctggtggcaaacgtgatttgttcgctcataagaaatcctttcttagagaattatcgaggtccggtatcataccgactgcaataatgaaataagagcaaacgaagaaactttcagaattaggcccggcggcgcagaaaattttgctattcgcctcgcaagaacggagagccgtcgattgacactaagggcggagtgacataatttcaggagtgagggttagggagaggtttccccctccccctggtgttcttagtaagcctggaagctaatcactaagagtatcaccagtatgatgacgtgcttcatcataaccctttccttattaaaagccctcttctccgggagaggctttcccgtttcagcgtcccgctgaaatcatcggcttacctcctttcgccctgaatgcagtctatcgctaacgcgtgaataaaatagtttcctctgtgattattgcgtaacgactcgcaaagaatatttgctggcaggatcgcagactacaaagcctgcggattgacaatcttatcgtgaaggcatactttcaggagtgagggtagagcggggtttcccccgccctggtagtcttagtaagcggggaagcttatgactaagagcaccacgatgatgagtagcttcatcatgaccctttccttatttatggccccttcctcgggaggggctttcccgtttcagcgtcccgctgaaatcgtcggcttacctcctttcgccatgcaagcagtctatcgctaacgcgtagataaaatagtttcctgtgttattactggatgcgtgctcgcaaatgtgcccgtcattcagacgattccagacagtgtttcataattcctccatttttctcccttattggctggctacactagtatcattccgcgaaacgtttcaggaagagaaactcttaacgatgaaaggtagttataaatcccgttgggtaatcgtaatcgtggtggttatcgccgccatcgccgcattctggttctggcaaggccgcaatgactcccggagtgcagccccaggggcgacgaaacaagcgcagcaatcgccagcgggtggtcgacgtggtatgcgttccggcccattagccccggttcaggcggcgaccgccgtagaacaggcagttccgcgttacctcaccgggcttggcaccattaccgccgctaataccgttacggtgcgcagccgcgtggacggccaactgatagcgttacatttccaggaaggccagcaggtcaaagcaggcgatttactggcagaaattgaccccagccagttcaaagttgcattagcacaagcccagggccaactggcaaaagataaagccacgcttgccaacgcccgccgtgacctggcgcgttatcaacaactggcaaaaaccaatctcgtttcccgccaggagctggatgcccaacaggcgctggtcagtgaaaccgaaggcaccattaaggctgatgaagcaagcgttgccagcgcgcagctgcaactcgactggagccggattaccgcaccagtcgatggtcgcgttggtctcaagcaggttgatgttggtaaccaaatctccagtggtgataccaccgggatcgtggtgatcacccagacgcatcctatcgatttagtctttaccctgccggaaagcgatatcgctaccgtagtgcaggcgcagaaagccggaaaaccgctggtggtagaagcctgggatcgcaccaactcgaagaaattaagtgaaggcacgctgttaagtctagataaccaaatcgatgccactaccggtacgattaaagtgaaagcacgctttaataatcaggatgatgcgctgtttcccaatcagtttgttaacgcgcgcatgttagtcgacaccgaacaaaacgccgtagtgatcccaacagccgccctgcaaatgggcaatgaaggccattttgtctgggtgctgaatagcgaaaacaaggtcagcaaacatctggtgacgccgggcattcaggacagtcagaaagtggtgatccgtgcaggtatttctgcgggcgatcgcgtggtgacagacggcattgatcgcctgaccgaaggggcgaaagtggaagtggtggaagcccagagcgccactactccggaagagaaagccaccagccgcgaatacgcgaaaaaaggagcacgctcctgatgcaggtgttacccccgagcagcacaggcggcccgtcgcgcctgtttattatgcgtcctgtggccaccacgctgctgatggtggcgatcttactcgccgggattatcggttatcgcgccctgcccgtttcggcgctgccggaagtggactatccgaccattcaggtggtcacgctctacccaggtgccagcccggatgtcatgacctctgccgttaccgcgccgctagaacgccagttcgggcagatgtctggcctgaaacagatgtcgtcgcaaagttccggcggtgcgtcagttatcactttgcagttccagctaacattaccgctcgatgtcgccgagcaggaagtgcaggccgcgattaacgctgcgaccaacttgttgccgagcgatctgcctaacccgccggtttacagcaaagtgaacccggcagatccgccgatcatgacgctcgccgtcacctcaaccgccatgccgatgacgcaagtggaagatatggtggaaacccgcgtcgcgcagaaaatctcgcagatttccggcgtcggcctggtgacgctttccggcggtcagcgtccggctgttcgcgtcaaacttaacgctcaggcgattgccgccctcggcctgaccagcgaaaccgtgcgcaccgccattaccggcgctaacgttaactcggcaaaaggtagcctcgacggcccttcccgtgcggtcacgctttccgcgaacgaccagatgcaatccgccgaagagtatcgccagctaatcatcgcctaccagaacggcgcgccaattcgtctgggcgatgtcgcaactgtagagcaaggtgcagaaaacagctggctcggcgcgtgggcgaacaaagaacaggccattgtgatgaatgttcagcgccagcccggtgctaacattatctccaccgccgacagcattcggcagatgctgccacagctcactgagagtctgccgaaatcggtgaaggtgacagtgctttccgatcgcaccaccaatatccgcgcatccgtcgatgatactcagtttgaattgatgatggctatcgcgctggtagtcatgattatctacctgtttttgcgcaatattccggcgaccatcattcccggtgttgctgtaccgctgtcgttaatcggcactttcgcggttatggtgtttctcgatttttcaatcaataacctgacactgatggcgttaactatcgccaccggattcgtggtcgatgacgccatcgtggtgatcgaaaacatttcccgctatatcgaaaaaggcgaaaaaccgttggcggcggcgctcaagggcgcaggtgaaatcggctttaccattatctcgctgaccttctcactgattgcggtgttgatcccactgctgtttatgggcgatatcgtcgggcgactgttccgcgaatttgctattaccctggcggtagcgattttgatctcagcggtggtgtcgctgaccctgacaccgatgatgtgcgcgcggatgctcagccaggagtcgttgcgtaaacagaaccgcttctcccgtgcctcggaaaaaatgttcgacaggataatcgccgcctatggtcgtggactggcgaaagtgctgaatcatccgtggctgaccttaagcgtggcactcagcacgctgctgcttagcgtgctgctgtgggtgttcattccgaaaggtttcttcccggtacaggacaatggcattattcagggcactttgcaggcaccgcaatccagctcctttgccaatatggcccagcgacaacgccaggtcgcggacgtgattttgcaggatccggcagtgcaaagcctgacctcatttgttggcgttgatggcactaacccgtcgctgaacagtgcacgtttacaaatcaacctcaaaccgttggatgaacgtgatgatcgggtgcaaaaagtcatcgcccgtctgcaaacggcggtagataaagtgccgggcgtcgatctcttcctgcaaccaacgcaggatctgactattgatactcaggtcagccgcacccagtaccagtttaccttgcaggccacgtcactggatgcgctcagtacctgggtgccacagttgatggaaaaactccagcaactgccacagctttctgatgtctccagcgactggcaggacaaagggctggtggcgtatgtcaatgttgatcgcgacagcgccagccgtctggggatcagcatggcggatgtcgataacgccctgtacaacgcgtttggtcagcggctgatttccactatttatactcaggccaaccagtatcgcgtggtgctggagcacaacaccgaaaataccccaggcctcgcggcgctggataccattcgcctgaccagcagcgacggcggcgtggtgccgctaagctcaattgccaaaattgagcagcgttttgcgccgctctccatcaaccatctggatcagttcccggtaacgaccatctcctttaacgtgccggataactattcgctgggcgatgcggtgcaggcgattatggacaccgaaaagacgctgaatctgccggtggatatcaccacgcagttccagggcagcaccctcgccttccagtcggcgctgggcagcactgtctggctgattgtcgcggcggtggtggcgatgtatatcgtgctcggcattctgtacgagagctttattcacccgatcaccattctctcgacgctacccaccgcaggggttggcgcactgctggcgttgctgattgctggtagcgaactggatgtgattgcgattatcggcattattttgctgatcggtatcgtgaagaagaacgccatcatgatgatcgacttcgcgctggctgctgagcgcgagcaaggcatgtcgccgcgcgaggcaatctaccaggcttgtctgttgcgttttcgtccgatcctgatgaccactctggcggctctgcttggcgcgctgccgctgatgttgagtaccggggtcggcgcggaactgcgtcgtccgttaggtatcggcatggtcggcggtctgattgtcagccaggtgctgacgctgtttaccacgccggtgatttatttgctgttcgaccgcctggcattgtggaccaaaagccgctttgcccgtcatgaagaggaggcgtaagtgaagttttttgccctcttcatttaccgcccggtggcgacgattttactgtcggttgccattaccctgtgcggcatactgggcttccgtatgctgccggtcgccccgctgccgcaggtcgattttccggtgattatcgtcagcgcctcgctgcccggtgcgtcaccagaaacaatggcgtcttccgttgccacgccgctggagcgctcacttgggcgcattgccggagtcagtgaaatgacctccagcagttcgctcggcagcacgcgtattattttgcagtttgattttgaccgggatatcaacggcgcagcgcgtgatgtgcaggcggcgatcaacgctgcacaaagtttgctgcccagtgggatgcccagccgcccgacctatcgcaaagcgaacccgtcggatgcgccaattatgatcctcacgctgacgtccgatacttattcgcagggtgaactgtacgatttcgcctcgacgcagctggctccgacgatttcgcaaatcgacggtgttggtgatgtcgatgtcggaggcagctcactgcccgccgtacgcgtcgggctgaatccgcaggcgctgtttaatcagggcgtgtcgctggacgacgtacgcaccgccgtcagcaatgccaacgtgcgtaaaccgcagggcgcgctggaagatggcactcaccgctggcagatccagaccaatgatgagctaaaaaccgccgctgaatatcagccgttgattattcactacaacaacggcggcgcggttcgtctgggcgatgtggcgacggtgaccgactcagtgcaggatgtgcgcaacgccgggatgaccaacgccaaaccggctattttactgatgatccgcaaactgccggaagccaatattatccagacggttgacagcatccgggcaaaattaccggagttgcaggaaaccattccggcggcgattgatctgcaaattgcccaggatcgctcccccaccattcgcgcctcgctggaagaagtcgagcaaacgctgattatctcggtggcgctggtgattctggtggtgtttttattcctgcgctcgggtcgcgccactattattcccgccgtttcggtgccggtttcgctgattggtacgtttgcggcgatgtacctgtgcggattcagtctcaataacctttcgttaatggcgctcaccatcgctactggtttcgtggtggatgacgccatcgtggtgctggaaaacattgcacgtcatctggaagcgggaatgaaaccgttgcaagccgcactgcaaggtactcgcgaagtcggttttacggtgctgtcgatgagtctgtcactggtggcggtgttcctgccgctgctgttgatgggcggattgccgggccgactgttacgcgaatttgccgtgacgctttctgtcgccattggtatatcgttgctggtttctctgacattaacgccaatgatgtgtggctggatgctgaaagccagcaagccgcgcgagcaaaagcgactgcgtggttttggtcgcatgttggtagccctgcaacaaggctacggcaagtcactaaaatgggtgctcaatcatacccgtctggtgggcgtggtgctgcttggcaccattgcgctgaatatctggctgtatatctcgatcccgaaaaccttcttcccggagcaggacactggcgtgttgatgggcgggattcaggcggatcagagtatttcgtttcaggcgatgcgcggtaagttgcaggatttcatgaaaattatccgtgacgatccggcagtggataatgtcaccggctttacaggcggttcgcgagtgaacagcgggatgatgtttatcaccctcaagccacgcgacgaacgcagcgaaacggcgcagcaaattatcgaccgtctgcgcgtaaaactggcgaaagaaccgggggcgaatctgttcctgatggcggtacaggatattcgcgttggtgggcgtcagtcgaacgccagctaccagtacacgttgttatccgacgacctggcggcactgcgagaatgggagccgaaaatccgcaaaaaactggcgacgttgccggaactggcggacgtgaactccgatcagcaggataacggcgcggagatgaatctggtttacgaccgcgacaccatggcacggctgggaatcgacgtacaagccgccaacagtctgttaaataacgccttcggtcagcggcaaatctcgaccatttaccagccgatgaaccagtataaagtggtgatggaagtggatccgcgctatacccaggacatcagtgcgctggaaaaaatgttcgttatcaataacgaaggcaaagcgatcccgctgtcgtatttcgctaaatggcaaccggcgaatgccccactatcggtgaatcatcagggattatcggcggcctcgaccatttcgtttaacctgccgaccggaaaatcgctctcggacgccagtgcggcgatcgatcgcgcaatgacccagcttggtgtgccttcgacggtgcgcggcagttttgccggcacggcgcaggtgttccaggagacgatgaactcgcaggtgatcctgattatcgccgccatcgccacggtgtatatcgtgctgggtatcctttacgagagttacgtacatccgctgacgattctctccaccctgccctcggcgggcgttggagcgctgttggcgctggagctgttcaatgccccgttcagcctaatcgccctgatagggatcatgctattaatcggcatcgtgaagaaaaacgccattatgatggtcgattttgcgcttgaagcccaacggcacggtaacctgacgccgcaggaagctattttccaggcctgtctgctgcgttttcgcccgattatgatgactaccctggcggcgctgtttggtgcgctgccgctggtattgtcgggcggcgacggctcggagctgcggcaacccctggggatcaccattgtcggcggactggtaatgagccagctccttacgctgtataccacgccggtggtgtatctctttttcgaccgtctgcggctgcgtttttcgcgtaaacctaaacaaacggtaaccgagtaaatgacagatcttcccgacagcacccgttggcaattgtggattgtggctttcggcttctttatgcagtcgctggacaccaccatcgtaaacaccgcccttccctcaatggcgcaaagcctcggggaaagtccgttgcatatgcacatggtcattgtctcttatgtgctgaccgtggcggtgatgctgcccgccagcggctggctggcggacaaagtcggcgtgcgcaatattttctttaccgccatcgtgctgtttactctcggttcactgttttgcgcgctttccggcacgctgaacgaactgttgctggcacgcgcgttacagggcgttggcggcgcgatgatggtgccggtcggcagattgacggtgatgaaaatcgtaccgcgcgagcaatatatggcggcgatgacctttgtcacgttacccggtcaggtcggtccgctgctcggtccggcgctcggcggtctgctggtggagtacgcatcgtggcactggatctttttgatcaacattccggtggggattatcggtgcgatcgccacattgctgttaatgccgaactacaccatgcagacgcggcgctttgatctctccggatttttattgctggcggttggcatggcggtattaaccctggcgctggacggcagtaaaggtacaggtttatcgccgctgacgattgcaggcctggtcgcagttggcgtggtggcactggtgctttatctgctgcacgccagaaataacaaccgtgccctgttcagtctgaaactgttccgtactcgtaccttttcgctgggcctggcggggagctttgccggacgtattggcagtggcatgttgccctttatgacaccggttttcctgcaaattggcctcggtttctcgccgtttcatgccggactgatgatgatcccgatggtgcttggcagcatgggaatgaagcgaattgtggtacaggtggtgaatcgctttggttatcgtcgggtactggtagcgaccacgctgggtctgtcgctggtcaccctgttgtttatgactaccgccctgctgggctggtactacgttttgccgttcgtcctgtttttacaagggatggtcaactcgacgcgtttctcctccatgaacaccctgacgctgaaagatctcccggacaatctggcgagcagcggcaacagcctgctgtcgatgattatgcaattgtcgatgagtatcggcgtcactatcgccgggctgttgctgggactttttggttcacagcatgtcagcgtcgacagcggcaccacacaaaccgtctttatgtacacctggcttagcatggcgttgatcatcgcccttccggcgttcatctttgccagagtgccgaacgatacgcatcaaaatgtagctatttcgcggcgaaaaaggagcgcgcaatgaagttctggcgacccggtattaccggcaaactgtttctggcgattttcgccacctgcattgtcttgctgatcagtatgcactgggcggtgcgtatcagttttgagcgtggctttattgattacatcaagcatggtaatgaacagcgattacaactgttaagtgatgcgcttggcgagcagtatgcgcagcatggcaactggcgcttcctgcgcaacaatgatcgctttgtctttcagatcctgcgttcatttgaacacgataattcggaagataaacccggcccgggtatgccaccgcacggctggcgtacccagttctgggtggttgatcaaaacaacaaagtgctggttggtccgcgagcgccgattccacctgacggtacacggcgacccattctggtcaacggtgcggaagttggcgcggtgatcgcctcccccgttgagcggttaacgcgcaatactgatatcaatttcgataaacaacagcggcaaaccagctggttgattgtcgccctggcaacgttactcgcggcacttgccacttttctgctggcgcgcggtttactggcaccggtaaaacgacttgtcgatggcacgcacaaactggcggcgggcgatttcactacccgcgtaacgcccaccagtgaagatgaactgggcaaactggcgcaagacttcaaccagcttgccagcacactggagaaaaaccagcaaatgcggcgcgattttatggccgatatttctcacgaactgcgtacgccattagcggtgctgcgcggtgaactggaagccattcaggatggcgtgcgtaaattcacgccggagacggtggcgtctttacaggcggaggtcggtacactgaccaaactggttgacgatctccatcagttgtcgatgtctgatgaaggcgctctcgcctatcaaaaagcaccggtagatttgatcccactgctggaagtggcgggcggcgcatttcgcgaacgattcgccagtcgtggcctgaaactgcaattttccctgccagacagtattaccgtatttggcgatcgcgaccgtttaatgcagttattcaataacttactggaaaacagcctgcgctacactgacagcggcggcagcctgcaaatctctgccgggcagcgcgacaaaacggtgcgcctgacctttgccgacagtgcgccaggtgtcagtgacgatcagctacaaaaattgtttgaacgtttttatcgcaccgaaggttcccgcaaccgtgccagcggcggttccgggctggggctggcgatttgcctgaacattgttgaagcacataatggtcgcattattgctgcccattcgccttttggcggggtaagcattacagtagagttaccgctggaacgggatttacagagagaagtatgaccgagttaccaatcgacgaaaacacaccgcgtattttgatcgtggaagatgaaccgaagctggggcagttgctcattgattatctgcgtgctgcgagctatgcgccgacgcttatcagccacggcgatcaggtactgccgtatgtgcgccagacaccaccggatctgatcctgttagatctgatgctccctggcaccgatggcctgacgctgtgccgggaaattcgtcgtttttctgacattccgatcgtgatggtgacggcaaaaatcgaagagatcgatcgcctgctggggctggagattggcgcagatgattatatctgtaagccgtacagcccacgggaagtggtagcgcgcgtcaaaaccattttgcgccgttgcaaaccgcagcgcgagttgcagcaacaggatgctgaaagcccgttgattatcgacgaaggtcgttttcaggcttcatggcgcggtaaaatgcttgacctgacgcctgcggaatttcgtctgctgaaaacgctctctcacgaaccaggaaaagtgttctcccgcgagcaattgctcaatcatctttatgacgactaccgcgtagtaaccgaccgcaccatcgacagccacattaaaaacctgcgccgcaagctggaatctctcgacgccgaacagtcatttatccgcgccgtttatggcgtcggttaccgctgggaagccgacgcctgccgcatcgtttagttttagcgacattattttgttagccggagatggcgttcagaccagatccggcaacattatcccacgcatggtcagcaaactgacattatctctccgccctggcaggcatcagaaaatcgctcatactttaatcggtaaacagcacctttagatgctgttttcgatacacaatttcaatcaaggagtcattatggctggttggtttgaactcagtaagagcagtgataatcagttccggtttgtgctaaaagcgggcaatggtgagactatcctcaccagcgagctttatacctcaaaaacctctgcggaaaagggcatcgcgtcggtgcgtagcaacagcccgcaagaagaacgctatgagaaaaaaacggcaagtaacggcaaattctatttcaatctgaaagccgctaatcatcaaattatcggctccagccagatgtacgccaccgcgcaatctcgtgaaaccggaattgcctccgttaaagccaatggcacaagccagacggtgaaagacaatacgtaattacgatgccgggcgtgggttgttggcgtccggcgctttaccagagccccccacagcgctacaatgcccgcccttaaagtgggggcactcccctaaccgcttcatcaggtgaagcggatctgacctgtcatcagaacgagagaattatgtttaaaccggaactcctttccccggcgggaacgctgaaaaatatgcgttacgctttcgcttatggcgcagatgctgtttatgcgggccagccgcgttattccctgcgtgtgcgcaacaacgaattcaaccacgaaaatcttcagctcggcatcaatgaagcccacgcgctggggaaaaagttttatgtcgtggtcaacattgcaccgcacaacgccaagctgaaaacctttatccgtgacctgaaaccggtggtggaaatggggccggatgcgctgattatgtccgatccagggctgattatgctggtgcgtgagcacttccctgaaatgccgatccacctttcggtgcaggctaacgccgtgaactgggcgacggtgaaattctggcagcaaatgggcctgacccgcgtgatcctctctcgcgagctgtcgctggaagagattgaagagatccgcaatcaggtgccggatatggagatcgagatcttcgttcacggcgcgctgtgcatggcctactccggtcgctgcctgctctctggctatatcaacaagcgcgacccgaaccagggcacctgcaccaacgcctgccgctgggagtacaacgtccaggaagggaaagaagatgatgttggcaacatcgtacacaagtacgagccgattccggtgcaaaatgttgagccgacgctgggtatcggcgcaccaaccgacaaagtgtttatgatcgaagaggcccagcgtccgggcgagtatatgaccgcgtttgaagatgagcacggcacttacatcatgaactcgaaagatctgcgcgccatcgcccatgtagaacgcctgaccaaaatgggcgtgcattcgctgaaaatcgaaggtcgtaccaaatctttctactattgtgcacgcaccgcacaggtttaccgcaaagctatcgatgacgccgctgcgggaaaaccgttcgataccagcctgctggaaactctggaaggtctggcgcatcgtggctataccgaaggtttcctgcgtcgtcatactcacgacgattatcagaactacgaatacggttattcagtttctgaccgccagcagtttgttggtgagtttaccggtgagcgcaagggggacctcgcggcggtagcggtgaaaaataaattctccgttggcgacagccttgagctgatgacgccgcaaggcaacattaattttacccttgagcacatggaaaacgccaaaggcgaagctatgccgatagcaccaggcgatggttatactgtgtggctcccggtcccgcaggatcttgagctcaattacgcgctgctgatgcgtaatttctccggggaaaccacgcgtaatccccacggtaagtgattaatttcgattatttttcccggatggaaaattcttagaaaccgatcacatacagctgcatttattaaggttatcatccgtttcgctgaaaaacataacccataaaatgctagctgtaccaggaaccacctccttagcctgtgtaatctcccttacacgggcttattttttacgcgtaatacaatgaaataaaaggatttatttctggtcacgtccacacattgaccacatcgacaaaaaagcccctcgactgaggggcttcctgtttctaattacatccacataatttgctgccctgacggcaacgggtgcggccttacgacgtggacttctcccggcttcacaatgtatcgctgtaccgactcataagtgatgaacgtggcgctgcaattcacgttctgacactggtgataacgctcttttgtcgtgtcagtgatatagcggcttgtacgcgcatgtgcggcatgctggcataaaggacaatgaaacatcgcgagcacctcttccggttttgttgatggtgccattttagttaatttacccttacaaaacaaacagataaaataaaaacatcactcattatcttctgtttcgtaccccacatcagaaagcctgacctcaagctctaatgacgtcgtgaagccgctattattcagaaaatgtgtcaccttagtgattgtccagtcctgctcgtctatgacgcgcttaaagccagacactttgaccggtgtttccgtgtaaatatctgcccgaccggtagccaggctgatggagaactctgctacacgggcttatttttttatgcataagccctatctctggtaaccgtcttccattgaccacatcgatagaatcctccttcatagcacgatgcctttcacttatcggcatcgtgctcccacaggttccggctacgcacagccagaacgcgcatatttgacgcttaccaaaaaatattctcactctccacatttgaatgtcagacgagcgacaccatgtaatcctacaccttctgtcttcagctcaactatttgcatttttttgccctgagtaacacagaaatgagttgcatcattttttactatattttctgcaccagatattctacccctggctaaagaagcttcggcttcggtgtagtattggttatcgagtttacgctgaatattacttttatatgcaagaccaaatttaccgatacttgtctcatcattatgcacagcacaaccagacataataaaaatactaattaatgatatagcagctatctttttcatctcaccttcccccattaaataccaacgacactctctagtgtttaaatataataatggcatgattattataattgaataggattataataaatgttctgtacaacatttcctacataagtaggaattacggacattgaggcccttcagggtaactccatgggggctttaatatattatattgaagatgccactgtttagttgaatattaggtatatgctcttttttgaaatttatcggtggcagccgttagtattcgctgtccccattgcaagctcctggtggtaaccactgaatcctccatacttgaactgactttttatcctccgactttcatcctgttctgactccaccttttgttttctgctctacactatctacagaccaatcataaaggcacatacgatcatggcagaatttcccgccagcttactgattcttaatggcaaaagtactgacaatctacccttgcgcgaagcaattatgctgttgcgtgaggaaggaatgacgatccatgtgcgggtcacctgggagaaaggcgatgccgcacgatatgtagaggaggcccggaagtttggcgtcgcaacggtgattgccggtggtggcgatggcaccattaatgaagtttctacggcgttgattcagtgtgagggggatgacatacccgcgctgggaattttgccattaggaaccgccaatgattttgccaccagtgtagggattcctgaggcactggataaggcgctgaaactggcaattgccggtgacgccattgcgatagatatggcgcaggtcaacaaacaaacctgttttattaatatggcgacaggcggatttgggacgcgtattaccacagaaacgccggaaaaattaaaagccgcgctgggtagcgtctcttacatcattcatggcttaatgcgtatggatactctgcaaccggaccgttgtgaaatccgcggtgaaaactttcactggcaaggtgacgccctggtcattggtattggtaacgggcgtcaggccggtggcggtcagcaattgtgtccgaacgcgttaattaacgatggcttgctgcaactgcgcatttttaccggcgatgaaatacttccggctctcgtatcaaccttaaaatctgacgaagataacccgaatattatcgaaggcgcttcgtcgtggtttgatattcaggcaccacacgacatcacctttaatcttgatggcgaaccgttgagtgggcaaaattttcatattgaaatacttccggcagcgttgcgttgtcgattaccaccagattgtccactgttgcgttaatcaaactattctctcttgaaccagggagaatccgtaatgccggatgcggtgtaaacaccttatccggcatacagaacaatactacaccgtaattaattttacccgcgtcttctgcaatgccagtttatccacctctgacacagcatcatcggtaataataatgtcaattttttcgattggtagtacctgattaaaaccgcgacggttaaatttcgatgaatcgagaacggcaatcactttattagcggctgtgaccatcgcaccgctaatagaataaccttcattaaaggtcgtaataccattaaccgcatcaataccatcagcaccgacaaacattaaatcggcattaatatcctgtaatgaacgctcggcaatggaaccatgcatcgagcgcgttttatggcggaccgtgccaccacagacgaccagagtaatgtctttattttcggaaagggcaaacgctgccgggagactgttggtaatcaccgtgatatttttggcggtcattaatccttcggcgataagcattgtcgtacttccgctgtcgagaataacggtctgatcttacccagcaatagtggacacgcggctaagtgagtaaactctcagtcagaggtgactcacatgacaaaaacagtatcaaccagtaaaaaaccccgtaaacagcattcgcctgaatttcgcagtgaagccctgaagcttgctgaacgcatcggtgttactgccgcagcccgtgaactcagcctgtatgaatcacaactctacaactggcgcagtaaacagcaaaatcagcagacgtcttctgaacgtgaactggagatgtctaccgagattgcacgtctcaaacgccagctggcagaacgggatgaagagctggctatcctccaaaaggccgcgacatacttcgcgaagcgcctgaaatgaagtatgtctttattgaaaaacatcaggctgagttcagcatcaaagcaatgtgccgcgtgctccgggtggcccgcagcggctggtatacgtggtgtcagcggcggacaaggataagcacgcgtcagcagttccgccaacactgcgacagcgttgtcctcgcggcttttacccggtcaaaacagcgttacggtgccccacgcctgacggatgaactgcgtgctcagggttacccctttaacgtaaaaaccgtggcggcaagcctgcgccgtcagggactgagggcaaaggcctcccggaagttcagcccggtcagctaccgcgcacacggcctgcctgtgtcagaaaatctgttggagcaggatttttacgccagtggcccgaaccagaagtgggcaggagacatcacgtacttacgtacagatgaaggctggctgtatctggcagtggtcattgacctgtggtcacgtgccgttattggctggtcaatgtcgccacgcatgacggcgcaactggcctgcgatgccctgcagatggcgctgtggcggcgtaagaggccccggaacgttatcgttcacacggaccgtggaggccagtactgttcagcagattatcaggcgcaactgaagcggcataatctgcgtggaagtatgagcgcaaaaggttgctgctacgataatgcctgcgtggaaagcttctttcattcgctgaaagtggaatgtatccatggagaacactttatcagccgggaaataatgcgggcaacggtgtttaattatatcgaatgtgattacaatcggtggcggcggcacagttggtgtggcggcctcagtccggaacaatttgaaaacaagaacctcgcttaggcctgtgtccatattacgtgggtaggatcagtcatcccttcgtggatcattttgactgccgcctgcgctattctgttttttggcgcgctggcgagctgaaatcgctctttaaacccgacttcctgggtctcggtttcactattaccagacattattttcgccgcaccgccatgaaagcgcgtaaccacgcctttttgttcgagaaagcgcaaatcggcacggattgtcgcttccgaggcagcaaatactcccgccagatcctgaacaagcacggttccctgttcattcactaattggatgatcttattccttcgctcgaatgaattcatcgtcatttacccatattcaattgtggctagtgtaaacgaagggggaccattggtgaatgatctgttttgcacaataccgggccagcatcacgctggcccgcggtttcagggaatgagcaacactttgcccggcatagcattacgagcgatgtcacgcaccgcctgggcgaagctttcaaagcttccacggtgagcgattaatggctccaggcttaacttacgttctgtcagcaaccggctcgccgtttcccactcctgccccggccaagggctggagtagttcatccaactgccgataaccgtcagctctttacgcaatattttgccaaacgttgccgatgttaaatgcagatcctgatgcaacgtgcccaccagcgccagttgggcatgaggaccggcaatctctaccgccagttcgacagtttgcggtacgccagccgtctcgaggataagctgattaaagcgcagttcgcgtaaaacgctctgcatttgcggcgcgctcatttcgctactgttaaatgtttgcatcgcaccgaaagattttgccagtgccagtttttctgaactaatgtcgatcgccgtcacactctttgctcccagcgcgacagcgcactgaatggccagcaggccaatggttccggcaccaataataataacgtttttattctcacaaccttgcgctaaatgaaaagcatgcagaccaacggtaatcggctcaataaaagccccatcctcaataggcatatccgtgggtagagcaaagacattttttcgcttaacgacaatatattcagcaaatccaccatcacgccgcgagccaataaaatcatattttgcgcactgggaataaaaccctttcagacactctggacaagtaaaacagggtaataacggcacacaggcaaccgcatcgccagggtgtaaatcatcaacaccggatcccaccgcatcaatatagccgctaaattcatggcctaacgttattggataataatgtgcaccatttttaaatatcctgggtaaatcggaaccacataagcccgagctggcaatttttacccgcacctcatcctgatgtttaatttcaggaatgacgctttctgcaacgcgcacgataccatcagtatcattcaccactgatttcataaaaactcctgattgttaagggggataacctccccctcaggtaaaaattattctgcgagaacgactttctcttgtttaataaagccacgcgctctacgccaggtcatgaaaataccggtcagataaattgcaccgataataatgaaaccgggaatattttgcggggagaaaacctgaatcagtaaccaggtaatgggagaaccgccctgatccattgaagccaccatacccccggcttttaacgccccagcattagccgccagttgggtgtgcaaaccaatagtttgcgtcgcgatccacagggtgatgctcataatgatgacacccgagattaaggtgcggaacagatttccacgatgcacggcgaccgccatcgccacgaagaagccgatggtggcaagatcgccaaacggcagcacctgattacccggcacacaaacagcaattaaaatggtgagtgggataaaaatcaggcttgccgataccaccgccgtatgtcccagcagcaacgccggatcaaggccaatcaggaactcctgaccgccgaacttcgcctgtaaacgactacgagcctgcttagcgatgggcgttaaaccatccatgatgggtttaatcacccgtggcattagcagcatcactgccgccgtttttaccgccagctgcaatacacctttgacatcgtaacccgcgaggatgccgataatcagccccatcacaaaacccacggtgacaggctcgccaaatggaccaaatttgcgctgaatatcgtcggcgctaaatttaattcggttaacgcctgggattttctcgatgatagcatcgaccagcaccgcaatcggccccatatacgccgacgtaccgtgcggaatagcaataccttccagctcaaagaaatttcgggtatcgcgggcaaaccagtcgccgagcttataaacaaacgccgcgtgaattaccacacctgccatccctatcatccatgaaccggttgccagatgcagcaacgcgccggtgaaggtcatatgccagatattccagatatcaacatttaccacccgcgtcatacgggtcagtaacatcgccacgttaaccagaatcgcaatcggaatcgccaccagcgcaatttgcgacgcccaggtcattggtgaagagcccggccagccaacatcgaccacatgcagattcaggtcgaaattttccgccatcgctttcgccgccgggccaatggaatccagcattaagccaatcacaaggccaatgccaacaaagccaatcccgatatgcagacccgctttaaagcaatcgcctgccttcatgcctaatattttagaaaaaataatgatgacaatcggcagcatcaccgtagggccgaggtcgagaatataacgcatgacttctgaaaacataggtcacccctgtaagatagtcagaattttattttgtaatgcttcgataccgataccagaaataaaaggcatgccgtgaactaacggaatatcgccaaaactacgatccactttggcagtggtgcatatcaaatgcacaccatccatataggtttctatttcattaacccgacactggattaattcaacaggaatattatgattctgacacaactctttaatttcttccgccgccatcgtagaggtcgcaaccgcgcctccgcaagcgacaataatcttgcgtttcataaatagtcctttttattgttacagagggatttattcgtctgaatctaaaacatactttgtgaagtattcctttaactgggtttcaggaagagtgattagtgtctcgacgatatcgggctgttgtaacttgccaaataaacagcgtaaaagtttcaattgctgctgcggattttccacaatcaacgcaataaccaacgataccgccacgtcgttatcatcatccgcttgctgaaaatgaactttatttgttggccttaacagataaatggctgacgacttagggaaggtgcgaacaagtccctgatatgagatcatgtttgtcatctggagccatagaacagggttcatcatgagtcatcaacttaccttcgccgacagtgaattcagcagtaagcgccgtcagaccagaaaagagattttcttgtcccgcatggagcagattctgccatggcaaaacatggtggaagtcatcgagccgttttaccccaaggctggtaatggccggcgaccttatccgctggaaaccatgctacgcattcactgcatgcagcattggtacaacctgagcgatggcgcgatggaagatgctctgtacgaaatcgcctccatgcgtctgtttgcccggttatccctggatagcgccttgccggaccgcaccaccatcatgaatttccgccacctgctggagcagcatcaactggcccgccaattgttcaagaccatcaatcgctggctggccgaagcaggcgtcatgatgactcaaggcaccttggtcgatgccaccatcattgaggcacccagctcgaccaagaacaaagagcagcaacgcgatccggagatgcatcagaccaagaaaggcaatcagtggcactttggcatgaaggcccacattggtgtcgatgccaagagtggcctgacccacagcctggtcaccaccgcggccaacgagcatgacctcaatcagctgggtaatctgctgcatggagaggagcaatttgtctcagccgatgccggctaccaaggggcgccacagcgcgaggagctggccgaggtggatgtggactggctgatcgccgagcgccccggcaaggtaagaaccttgaaacagcatccacgcaagaacaaaacggccatcaacatcgaatacatgaaagccagcatccgggccagggtggagcacccatttcgcatcatcaagcgacagttcggcttcgtgaaagccagatacaaggggttgctgaaaaacgataaccaactggcgatgttattcacgctggccaacctgtttcgggcggaccaaatgatacgtcagtgggagagatctcactaaaaactggggataacgccttaaatggcgaagaaacggtctaaataggctgattcaaggcatttacgggagaaaaaatcggctcaaacatgaagaaatgaaatgactgagtcagccgagaagaatttccccgcttattcgcaccttccttagcatgaatcgcctcacaatgcggtattgcaatagcgtgctgctcaagcattatcccggtagggaattctgcttctctggcaattaatgcctgtggccaggtatcatgaaccacacctttggcgagcatctcattaccgatatgggttaaaacttcgctacgatcgacaaaagaaattccgctacgaacaaacaggttagtcatataccgtccttattccgcacagccgtagcgataggcgcgcaaaacatcataaattttatccataatcagctgatgcggtattgctgataattccccggactgaatgcgttcaaattgtttgggaagatactgactaatcatgcccagtgggatgtccacgccttcaagattcaccatcatcgtttcgacgctatttttaatccgactatgcggccagtaataacgaatacgatccgacaggctgtaacgaatatccagtaatgaatcgttaaaacccgtacgataatattttttccagtattgcggttcgtcgagcatcacttcttcaattaccgccaggcaaccgctgcgattttcaggggcgataagttcctgctcaatttgtgccagtgcaaatatcgcctcgcgtaaagcaaaggttaatgcgggaccgactttcaatattgcaaagtgatcgcggactaattcccaataagccgtccgggtctggtaatcggtagaatgtgcttcataaaccattcgggtgttttctatccattgcgccagcggctgcgcttcctgcggctgataatggataatattgctgtgatcaaattccacacccggctgcaccacgatggcaatcacacgtgttaacgcctctgtcagcccacgggcaataaaggccttttgatgcgtacgtaaagtattggcggcatcttcaacatgggtgatgtgtactgactgaatggcgctggcctcaccgcccggaaccggaacttcggtgccaatgacatagctcagttgctcacgctggcaatctgtcgccacactttccgcagcaaagcaaagcacagcagctcgttccgcaaccgtttctggtgctaacggtatgggatcccccgcgcaggacattgacgcatcaagatgaattttactgaagccggcacgaacatattcctttaccagctcgacggatttttccatcgccgcatccgcattttcttgctgccagcagtttggccccagatgatcgccgccgagaataatgcgttcgcgtgcaaacccaactttatcggcaatcgtaaaaacaaattcgcgaaagtctgccggtgtcattccggtataaccgccaaattgattgacctggtttgacgttgcttcaatcagcactttgcgcgtgctgttgcgatcaaatgccagcgccgcttcgataaccaacggatgggcagaacagactgaacatatgccgatatgttcaccagctttatgccgggcaattaacgttttcatgttttttccttgttaaatggcaggtgcgttatgccctgccctcgcagccacaatcggcaatcactttgctcaccacatcgcgcattgcggatttagccgactgcaaataatcccggggatcggtcgcttcagggtgctcggtcaggtaattttttaacgcctgcgagaaggcatttttcagctccgttgcaacgttgattttgcatatccccagtttgatggtttgctgaatatccttagtcgataaccctgacgcgccatgcagcaccagcggtaagttcacccactggcgaatgttctccagtctagaaaaatcaagcgccggtgcgctggcatacatcccatgagccgtgccgatggcgaccgccagggaatcaattccggttgcctcggcaaattcacgcgcctgagcggggttggtgtacaacgcatcggcttcattgacttgcacatcatcttcctggccgccaagttgccccagctccgcctcgacgctgacatcaaagcgatggcaaaaatccaccacctctttgacccgtgaaatattttgcgcaaaaggcaaatgcgaggcgtcaatcatgactgagcgcacgccagaacgaaccttctgagcgatatcgtcaaatttcgtgtgatggtcgagatgaattgccagtggatggtgatattgcttcgccatcgcgctgaccagcgccaacagattttctgtaccagcatgagtaaatgtgccaggcgttccggcgatgatgaccggcgcatgcaggttggcagcggtttctaccaccacttgcatcgtttcgagattgtgaatattgaatgccggaaccgcataaccgccgcgctgtgcgttgttcagcatctgctttgtcgataccacgtacattttcatatcctgtcgtttgttttcgatttcaaaatataatgaaattatttgtttttaaatatcgagataacgatcacaaaaacgacaatatgaaaattattcgaggagtgaaaggcaaaaaaacggcctcccgatagggaagccgtagcaaagtgcgcgtgtttttatgccggatgcggtgtaaacatacgtggcagtgctatgtaggcatgataagacgcttcagcgtcgcatcaggcataggttgccggatgcagcgtaaacgccttatccgtcctacggggtggtgttgttcgtataaggcgtatcaggcgatagtaattttgctatcgagataaacgtcctgcacggcgttaatcagtttcacgccgtcagccatcgatttcttgaacgctttacgtccaagaatcagccccattccgcctgcgcgtttgttgataaccgcagtacgcactgcatcgctgaggtcagtttcaccgcccgcagcaccgccggagtttatcaacccagcccgacccatatagcagttagctaactgataacgcaccagatcaatcgggttttcgctggtcaatttgctgtaaacacgatcgtcggtgtaaccgtaattaattgctttatagccgccgttattttccgccattttttgtttgacgatatctgcaccgatggttgccgccagatggtttgcctgaccggtcaggtcggcggaaacatggtaatcaacgccatctttcttaaaggcggagttacgcaaataggcccacagcactgtcaccatacccagctcgtgcgcacgttcaaaagccgcagaaatttcttcaatctggcgacgtgactcttccgagccaaaatagatagtcgcaccaaccgcaaccgcgcccatgttgaacgcctgctccacgctggcatacagcgtttgatcgtaggtattcgggtaacttagcgtctcgttgtgattaagtttgacgaggaatggaatgcgatgcgcataacgccgcgataccgacgccagcacgccgtaagttgacgccacacagttacagcccgcttcgatcgccagttcaacaatgtttttcgggtcaaagtagagcgggttagcagcaaatgaagctccggcagagtgctcaacgccctggtcaaccggcagaatagaaagatatcctgtgccagccagacgcccggtgttgtacaacgtctgcatattacgtaacaccgctggcgggcgattattgtcaatcattacgcggtctacgtagtcatgtccggggagataaagctggtcagaaggaattgtcatacaacggtgctgtaaaaggttgtcggcgtctttgccaagcaactgcgcaatatctgtcattactatgctcccgtaaattccgattggatatcggctatggattgtcctggcccgccttttgcgggcaatcataatcctggtcgttacgggcgagtttttccatcttttggatgttttttcagcgttttctgttggctcgattcatcagaaaaaatgttagcgcggtcaagttttcaccgcaaaggtatttaaaaggtattattaagtggtattgtcatcgcgtaccttacattacctgtcatgaaggaattaaaagatgaaaacaacagcaaagctgtcgttcatgatgtttgttgaatggtttatctggggcgcgtggtttgtgccattgtggttgtggttaagtaaaagcggttttagtgccggagaaattggctggtcgtatgcctgtaccgccattgcggcgatcctgtcgccaattctggttggctccatcactgaccgctttttctcggcgcaaaaagtgctggcggtattgatgttcgcaggcgcgctgctgatgtatttcgctgcgcaacagaccacttttgccgggttcttcccgttactgctggcctactcgctaacctatatgccgaccattgcgctgactaacagcatcgcttttgccaacgtgccggatgttgagcgtgatttcccgcgcattcgtgtgatgggcactatcggctggattgcctccggtctggcatgtggtttcttgccgcaaatactggggtatgccgatatctcaccgactaacatcccgctgctgattaccgccggaagttctgctctgctcggtgtgtttgcgtttttcctgcccgacacgccaccaaaaagcaccggcaaaatggatattaaagtcatgctcggcctggatgcgctgatcctgctgcgcgataaaaacttcctcgtctttttcttctgttcattcctgtttgcgatgccactagcgttctattacatctttgccaacggttatctgaccgaagttggcatgaaaaacgccaccggctggatgacgctcggccagttctctgaaatcttctttatgctggcattgccgtttttcactaaacgctttggtatcaaaaaggtattattgcttggtctggtcaccgctgcgatccgctatggcttctttatttacggtagtgcggatgaatatttcacctacgcgttactgttcctcggtattttgcttcacggcgtaagttacgatttttactacgttaccgcttacatctatgtcgataaaaaagcccccgtgcatatgcgtaccgctgcgcaggggctgatcacgctctgctgccagggcttcggcagtttgctcggctatcgtcttggcggtgtgatgatggaaaagatgttcgcttatcaggaaccggtaaacggactgactttcaactggtccgggatgtggactttcggcgcggtgatgattgccattatcgccgtgctgttcatgatttttttccgcgaatccgacaacgaaattacggctatcaaggtcgatgatcgcgatattgcgttgacacaaggggaagttaaatgaaaacagaacgtattctcggtgctctttatgggcaggcgttaggggatgcgatggggatgccctccgagctttggccacgcagccgcgttaaagcacactttggctggattgaccgttttcttcctggaccaaaggagaataacgcggcctgttattttaaccgcgccgaattcaccgacgatacctcgatggcgctgtgtctggcggatgcgttactggaacgtgaaggcaagatcgatccggatctgattgggcgtaatattctcgactgggcgctgcgtttcgacgcctttaacaaaaacgtactaggtccgacctcgaagattgcgcttaacgccattcgcgacggtaaacccgttgctgaactggaaaacaacggcgtgaccaacggcgcagcgatgcgcgtctcgccattaggttgtttgcttccggcgcgtgatgttgattcctttattgatgatgtagcgctggcgtccagcccgacccataaatccgatctggcggttgcaggcgcggtagtcatcgcatgggcgatttctcgtgccattgacggagaaagctggtcagcgattgttgattccctgccttcaattgcgcgacatgcacagcaaaaacgcatcactacgttcagcgcctcactggcggcgcggctggagattgcgctgaaaattgtgcgcaatgccgacggcaccgaatccgccagcgaacagctttaccaggtcgttggcgcaggtaccagcactattgagtccgttccgtgcgccattgcgctggttgaactggcacaaaccgacccgaatcgctgcgccgtcctgtgcgctaaccttggcggcgacacagacaccatcggtgctatggcgacggcaatttgcggcgcgttgcatggcgttaacgctatcgatcctgcgttaaaggcggaactggatgcggtaaatcagcttgatttcaaccgctatgccacagcgctggcgaaatatcgtcaacaacgggaggcggtatgagcggcgctcgattacacacgctgctgcctgaattaaccacgcgtcagtcggtgatggtcgtcggcgcggcggtcattgacgtgatcgccgacgcttatgccctcccctggcgtgggtgcgatatcgaactgaaacagcagagcgttaacgttggcggctgcgcactgaatattgccgtggcgttaaagcgcctcggcatcgaagcgggtaatgccttgccgctcggtcagggcgtgtgggcggagatgattcgcaaccggatggcaaaagagggcttaatcagcctgatcgataacgccgaaggtgataacggctggtgtctggcgctggttgagccggatggcgaacgcacttttatgtcattcagcggtgttgaaaatcagtggaatcgccagtggctggcgcgattaaccgttgcgcctggcagcctgctctatttttccggttatcaactggcctcgccctgcggcgaattgttagtggaatggctggaagagctgcaagacgtgacgccgtttatcgattttggcccacgtattggcgatatcccggatgcattactggcgcggatcatggcctgtcgacctttagtgtcgctcaatcgtcaagaggctgagattgccgccgaacgttttgctttatccgcagagataacaacacttggcaagcaatggcaggagaaatttgccgcgccgttgatcgttcgtctcgataaagaaggcgcatggtatttcagcaacgacgcttctggctgcattccggcatttccaacgcaagttgtcgacaccattggggcgggcgacagtcatgccggtggcgtacttgccgggctggcctctggtctgccactggcggatgccgtattactgggcaatgcagtggcgtcgtgggttgtcgggcatcggggcggtgattgtgcgccaacgcgcgaggaactactcctcgcacacaaaaacgtatagatcgctgcgacagtggctaatgctgtactcaataggccgttgctgttggtcaagcgccacttgcttgatcaccagcaccggtattttgctatctaactgaatatgtgactgaaactcggcatccggcatccgggcgctaacgcgggaacgcgtacgttgtgggtaaatgtgctggctgcggaaatagtcataaagtgaaatcccgatggcatcaacatcatgaattaaatgcgccggaacccacgattcctcaatcgataccgcttcttcatcgacatagcgaatacgcttaagcaaaaagacatcacttcctgcttcgaccgccagctgctgcgcgacttcttcgggacatttcacgacacgcttgttaacccatagcgtatcgggctttttcccgcgcaataccacctgctgagaaaaacctcgcgcttctttcaacgagtattcgaagatgttgttgatctgcgtgccgtaaccgcgcgaacgcgtcaccacaccctcttcttccagcgcctgcatcgccttgcgcaccgtaatgcgcgaaacgccggttaactgacttaaatcacgctcaccgggcaaaatattgccatgctccagcaccccgctgcgcacggcattttttaccgtttcggcaaacttaatataaagcggcgtgttatccgccgctaaaatacgctcgttcagttgggcaatcagctgggtatgcgcttgttccatttgtctttttcctgccggggagtctggtgggagtatatcactgcttcttatttaaggcgtttctttaatcccatcaacgaatgcctgcaactcctccaccgtgccattaaatacattaaaatccaccggaccattgatgccatctacctgtccacggtcggaatgctgccagaagcgccaggccattccgtcattgtccggacgacgttgatagtagtgagccacccaccacggatattcattgaaatagcccgccagattggtgtgataaaaaacggctcctgagtaaataatcggctttttccccgtacttttttcgaccatttttagccactgacttacccgcttgcgtaattcttttgccgataattttccccgttcttctacgtccagcacggcagggaaatcgccttgtgagaaatccaccgtttgcagaaataatctcgcctgaactgaagcggataccgacggggagaaataatgatacgccccacgcagcaggccattttcgcggcttagttgccagttacgcgaaaaataggggtccaccagcttttcgccttccgtcgccttaataaaagcaaactgtaagcggataccattgtcgcgcatttttgccacccgctgccagtcgatccgctcctgccagcgcgaaacatctattccgtgaatggtgtaactggcaggaatgcgaatagcgaaagatttaaccgggcgataaccgtagaagtggatgtagtctgtaatctgaactgctgtcgaatagaaaaaattcaccgtctgacgcggataaattgcaacgatggaaattagcccaagagcgcataatagagaggtgagtttttttcgactggtaattcttagctgcattggtttcatccctgaatgtcagtgccaaaggctgacaataaccaaagcagctatagtacggtgctcaccaccaggcgtggaagtggtgaaccggaccaataccgtgaccaacttccagcgtgtcggcctgggctaacgccgatgaaagccagctttttgcctcctgtacggtgtcagcccagtttgtatggcgcgggcgtagtgcagccaacgccgcagagagtgtacaaccagtgccgtgggtgtttttggtcataatgcgcggtgcggtaaaccgttgttcaccctcgcgggtaaacagccagtccgggctttgctcatcatccagatgaccacctttcattagcactgcgccacagcccatcgccaacagcgatcgcccttgttccagcatttcctgttcggtgcgcgcgtgtggcgcgtcgagcaaggcggcagcttcgggcaagtttggcgttattaatgaaacctgtggcaataatcgactgcgcagcgtagcaaccgccgaaggtgaaagcagcgggtcgccgctttttgccagcataacggtgtcgagtaccacgttttggatctgataacgttgcaaccgttctgccaccgcttcaacaatatcggtttccgccagcataccgattttagtggtatcgattcgcacatcgctgaacaccgaatcgagctgggcggcgacaaaatcaggctcaatgcgatacaccgactgtacgccacgggtattttgcgccaccagtgcagtaataactgagcaaccataagcgccaagtgccgagaaggttttaagatcggcctgaatccccgcaccaccactcggatcagtaccggcaatcgtcagagcgttaattcgtttcatgcctgcacctcctgcgtcaattgccagagcgcatcaaggaaatgtggaacaaaactgcctggcccctcgcttctggcgactgcgcgttctccggcttgtttcatccagtgacaggcagatgcgacattttccagcgtatcgcctggtaacgcacagcaggcagcgacaaccgccgataatgcacagccagttcctaccactttggtcattaacggatcaccaccgtgaataccaatgatacgatgtccatcggtaacataatccatctcgccagtgaccacgacgattgcgccagtttcccgtgccagtgtttgtgcagcgggtatcgcgttagctgcggcgtcagtggtatccactccccgtccgccattagcaatgccagctaatgccatgatttccgaagcattaccacgtatcgctgccggtttaaaagataaaagttcatgacaaaaatggcggcgataatcgagcgcacccaccgctactggatcaagcgtccagggtgtttgagagctttttgcttgctcaacggcagcacgcatcgcctgagcgcgtggctgcgtcagtgtgccaacgttaatcaacaaggcactggcgatagccgcaaactgactggcctcttcggtttcgataaccatcgctggcgatgcaccgagcgccagcaaggtattggcggtaaaggtttgcaccacatcattggtcatgcagtgcacaagaggggaatgttggtgaaaaaggtgtaacgcgtgcgcagattgcgctgaacccagcaggtcgacttgcatagtttgctcctgccataacgtgaagaagcaatgacctggtggtccgtgacttccctacgctggcattatccagatcaggtgatacgggtatttctcagccttcacgcagaagggcaccccgagtcgtttggttgcgatgataaatcgcagaggaggatggtaatgtccagcgcacgcgttgtaaacgaggaaaaacggcagttttacaatcgcgttaataaattatttgatatatgaatccagcaccttcagaacgacatccagatcttcttcacgttttagctcatccccctggtgaacgatgtgttccgtcagatgacctttaatcacttcccgcatcagaccgtttaccgcgccacggatagcagcaatctgttgtaaaactgcagcgcattcgtgcggctcgtcgagcattttcttgagcgccacgacctggccctgaatcttactggcacgcgctttcagtttctgtttatcacggattgtatgagacatggcaacacctggttaacaagaatatgaaaaatcatagcactattaatctactggggggtagtatcaggtactgggggggagtagaatcagattgccgaattaatactaagaattattatcatgaccgaatttacaactcttcttcagcaaggaaacgcctggttcttcatccccagcgccatcttacttggtgcgcttcatggcctggaaccagggcactcaaaaacgatgatggcggcgtttatcatcgccatcaaaggcaccattaaacaagcggtgatgctcggactggcagcaactatttcgcataccgcagtggtctggttaattgcctttggcgggatggtgatcagcaagcgctttactgctcaatcagcagaaccgtggctccagctgatttccgcagtgatcattattagcaccgcgttctggatgttctggcgtacctggcgcggcgaacgcaactggctggagaatatgcacgggcatgattatgagcatcatcatcacgatcacgaacatcaccacgaccatggacatcatcaccatcacgaacatggcgagtatcaggatgcccatgcacgagcccatgccaatgacattaaacgacgctttgatggtagagaggtcaccaactggcaaattttgttatttggcttaaccggtggccttatcccctgcccggcagcaattaccgtgctgttgatatgcattcagttgaaagccctgacactgggcgcaacactggtcgtcagtttcagcattggcctggcgttaacgcttgtcaccgtaggcgttggcgcagcaatcagcgttcagcaggtcgcaaaacgctggagcggatttaacactctcgctaaacgcgccccctatttttccagtctgttgattggcttagtcggtgtgtatatgggcgtacatggcttcatgggcataatgcgataactcaatcctttaggcttgcatgttatcttcagcccaggatgattcttaaatcagctatttccgctgactctctgctcgctaaggatgcttttagggcatcctttcatttacactttttacgaaatcatgggatcactaacaaaatatcgcttgtcagttatattgtatggcaggaaagatatgcgactgatattacagatccccaaagtggagagtttatgaccattaaaaataagatgttgctgggtgcgcttttgctggttaccagtgccgcctgggccgcaccagccaccgcgggttcgaccaatacctcgggaatttctaagtatgagttaagtagtttcattgctgactttaagcatttcaaaccaggggacaccgtaccagaaatgtaccgtaccgatgagtacaacattaagcagtggcagttgcgtaacctgcccgcgcctgatgccgggacgcactggacctatatgggtggcgcgtacgtgttgatcagcgacaccgacggtaaaatcattaaagcctacgacggtgagattttttatcatcgctaaaaaaagccccctcatcatgagggggaaatgcagacaccttgttattttttattattagccacttgctcgtcttgcttgttattagtcgtatttcacgttgattaatgcggttgcctccagtgcgccagatttaactttgtttgtatcgtagacgtagtaactggctgttatcggaattgaaaccgttgtatctgtaagttttgacttcgccgcaacttcctttaaatttgtatatcctttactgctgttagtgatatttaaaagtgtgactggcgaaccattactttcaagaataaatcctacgccattatcttccgcacctttcagtattgtgttgctgttggttaacaagtcagaacttgataaatacacctgcattttccgtgatgtttgattttgttgacctaataaatttttacaacgcagaataatatccccttgtttactatttattgttgctttgttacctgtggctggtaattgtgaaacgggaatactgtctaaagtaattaataaatcgtccggtttgcaggttgtggttatcgggttgtatgacaatgtcagattaaaggaatagacacctgcattttgtgccaatgcatttctgtagctatttacacatgcatcccatgacttgccacctaataaacacagtagaaattgtactgcggcactcccgcgtgtcgatgatgaagcactggataatgtcgcaacaccattaatcatcactgaaccgccgccccccgcagaaacattcacttttgcattactggccgcaggtgtcaccgtaactgaataaccactggtgaaactggtctgattatttgacaacgtgatgttgtttttattggtccattcaaaatgtaaatttaattttatggtatcgttataaagtccaacaataatatccgacgggctcataggggtgatagtatttgtacttacgcatgacgaatcattaaaattatgctcatatgtcgccatttgtgtttgagtaagtgcaaaatccccctgaacaaccaagttgtgctgaacagataactcactataacatgccgcatagctcacaggcataaccatcatcattaatataaatagcattatgcgaatttccatagaaccacctgactattactggcaaatataatttctactttcatcaatctctttaccgaaggtgattgtgcatgaaagtccttgttgcttatcaattgccacattaaccgatggcggtacttcattggtgcgaataaataactgacttccctggccgacaacgccaatattatgaccatggatatcattgacttcataaccaaacgttaatgattgcccatctgctcttaacgcttttataaaccatggcttgcgctgatcggtatcaaaattaaccagtacaaccgcgccgcgataaggggcggcaattttccggttgccacgtaattctgcttcgctatcgctttgcgacacatccagcatcaggtgattttcccgataaggtgtcattccgtcgtatatcaccactccattacggtttgttgtgcgatatttttgcccattgacataagcatctttaattcctggcgcattcatcacagcaaacgtttcggaaagacggttcgccagattaacgccacccgaccaggcgacaatgccccctgaaacactggctccagcctgtcgataagtactcgactgactataactgccattcactgtcgcaaccggcgcgttccaggtcaaattcgccccagctgtcgtttcatttccctgatgttgatgactcaggttgacaccataattgaactgatcccgactccctactgttcctgataatcccgtattatttgaggcaaacccctgatcatcaaacgtcgttgagttagacatatatatttgccgacgaggcgtcgaaacgtcatcaccccaatcaaagggaatcgatataaaaatattaaaacgtttctcttcatgatgattctcgtcataagcctggcttgccgcgagggtatagcttatccgtcgcaggttgttggaataactcaactgataatccttactactgccgctacgcccccagtaatctcgccataacgtacttaatgacacagacccccaaccttctggcaatgactggctcatattggcggaaaagctatttttgcggccaaaatcgttctggtaataatcggcaatgtcatagacatcgttttcatcacggcgataattatctttattgtttgcccaaacgtgatcgttaaatgtccggtaatcacgcgacgaataacgccaggccgccagaccaaaacgcgtcgacgtttggctcacaaatttgttgtaggcaatttgataactttgcccgtcaaacacatcgccgttgtcttgtttactatgcgacttagtggcatcgacggaaatggcaccaatgcgtgtattccagccagcccccaaagtaaacgcgtaataattattcgcgaccatcgagccaccatacagcgtcaataaattattaaaaccatactgataacccgcctggacaaaatcactttgtttgctcgccccttcaatatggctacgacccgccgctaaatcatatttcgacacgccgggttgcagcatatttggcaccgctgcataaggcaccagataggtggttaccgagccgtccgcctctttcacgctgacatcaagatctgctccaccaccggccaactgcaaatctgtaatcgcgaacgggccaggaggaacctctttctgataaaccacaaaaccattctgttcaatagttaccagcgcgttactctgagcaatcccctgcacccgtggcgtaaaattttgtttcgagttaggcaacatctgcatatcacgaaacaaccgcacacctctgaagcgaacagaatcaaaaatatcgcttgatgtgtacatatcacccacgcgaagcgtgccgagaagttgggcaaatccacgttccagatacagggtattgcttttccacacccctggattgttatttgttttactgaaactggcatcagaatgcagttgccaccccagtaaatttaacccgctgttaaaacgtacatatgtactcttgttattacccgacgctttatagtcgctgtaatactgactcagataataagaggtataaaacgcattaataccccgctcccagttttccggtggaacatagccactttccagttcttccacccaggcctgcgggacactgaaatcgagacgaaaaaccccgatatcccaggtatagctcccaccctgaacaagttgctcaaatgttaaacattgcttaccgctggcgaagttatcgctattaatgcctaaccgcttgataacttctcttgataaacatgtttcttgcgggttgtctttaacaataatctcatatttcccgcgccattgcttattgacataaatatcgatgtcatactgccccggtaagggttgattatcatcaagacgaatatttgcaacctgctggtctttcattccacctatcataaaatgggtatcaaaggtttcttcagctgcataagcttcaatgccgagcaataacgctacgattgctgatgcaagtggggtcattctcaacataggcagctcctgcaattaaattttgtcactaatatagttgccatggtcatcgataatggtcagatgccagttatttgcattattacttttgacattaacactctgactttctaagggggcaatcataatagtttcataattgactttgacattattagctttgacatccgaaatcgtcacccaattagctgagtcattttttatcaccaaaccattgccactgcgatttaccagcaattttttaaatgtcgctttatttaccggagcaatacccgctggccggtaaaacaacttaattctgttttgcatcgcaaacttcagtgcattcttaccttcttgctctggactatttggtggaatatccagaacattcagataaaaaatgctttctttattagtgggcagtttattcggcataattttgatttttacttgctgcccggaatttgcccctatttttgccactggtggcgttaacatgaaaggaacctgaattttttctggtggtaatgacgtatcgccatcatcaatccacgcctgcagcagcgaagaacggtttccctggttcatcaactgcaccatcacttctttattttctgccgggtaaataatgcgcgtcccgtagataacaattccggcatgtgcaggaaggaccatagaaaaaatgagtaaagataataatcctttcattttaatgcctcttaaattaaaaggccgccatgggatagcggccatgtttattacctggagaaacttacaattttatttattaatcctgcgccacacgcataaccagagaagataacacatcacctgattgcactgagttatctgtcagtttcaggtattttgctttaaacggaatagcatattgaccttccgctgttttataactctcaatgttaaaaggtgcagaaacatccaggacatcgctgttatcacctaaatagagatagtaacccacggtatcgttgctactggctatcgccttatcgttaccggttattttatcgttggtaatcaacgagagttttacaccagcaacttctttcgggcagctaatttttaacatgctgctggttacaccgactgcatcatcataggtagaatatttagctttaccttcaaagacactggttggtacagtcggcatattaatacttactgaatcaccacccgcttcgaatttacacggagattctgcaatattccccttaatagttaatgttccggtatcaacgtctgcagcaaatactccagcgctcataaaaaaagaagaaaagacagcggcagcaataattgaacgtttcataatatgttccttaataaaatttatttttggttgttaagagtctgtatctcttggaaacaaatttctcacatcaaaaaagttgccgcaatgtaaacacattgttttattgatttaaaacaaattaaccattgcaatataaatacaaaaaatatttaagagtattaactatttatcgcatctatcaattaatgtagatttatgtaaatggtattgttgatatcaataaaaaagccgaaatcatttatataaatgatttcggctttctaaatgcaattaaaatcaggttgccaaattaatcgtagcgatttaacacgattcgacgtttgctatcgctacctgcaacaaccacttctgtcgttacacctttgacgggcgaagaaaacagatgacgggtgtcaacattatacgttaactgaccacaatgctgttgaggttgaccattaaccatagccatactgcatgttgggggactgatcctgccattaatcgctaatgtggcagtctctgaagagaatgcgggagaagccaatccataggcaagaaaaataattcctgacagccaatacttattcattgaacgttatccctgtagtaaaggttatgcctggatagaatgagtgcataacaaactatagctgtacatccactacacagccacgaaggatgataatgaagcattgcctgtatgatcaatcgactttgtagagtttcggacgaaggtccgcagaatattcgcagtattaaataagtgttcattaatgcggcaaaaactaatacaccgcatcaatgtaacatctctgcggtgtatgaagaataaccagaatggttaataggcgttagaccgcgcggaaggaaatctcgcctggaatgacttcaccctgccagtagagctgagctgcaacgcggtcagccagctggcggtagatagcggtaaattcgctctccggacggctgataaccgttggcgtacctttatcgagatcctcacgtaaggagatgtgtaacggcatctgccccagcagctgtgtatggtatttttcagccagtttctctgcaccaccggtaccgaaaatcggttcatggtgaccacagttactgcaaatatgcacactcatgttctcgacaataccgagcaccggaacctcgactttctcgaacatcacaatgccttttttcgcatcgatcagcgcgatgtcctgcggggtggtgaccacgactgcaccggttactggaatgttttgcgccagcgtcaattgaatgtcaccggtgcctggcggcatatcaagcaccagatagtcgagatccggccacaaggtttcctgcaacatctgcattaacgccttgctcgccatcggtccacgccacaccatcgcattgtcgtcagtgaccagataaccaattgaattggttgccaggccatgagacataatcggtgccatatgggtaccgtccggcgaagttggacgctgattttctgcgcccaacattgttgggattgatgggccgtagatatcggcgtccagaatgccgactttcgccccttctgccgccagcgccagtgccaggtttaccgccgtggacgatttacccacgccgcctttaccggaactcaccgcgataatgttcttcacaccgttaattcccggctgattcttcacgcgtttcagagtggctatgttatgcgacagtttccagtcgatagctttcgccccggtgatgcgcagcagttcggcgctacattgctcttttaactcttcgaacgcgctatgccagacaaacggcataaccagttccacatgcaacgtgtcgtccatccaggcgacatggtgcaacgctttcagcgtggtgaggttatgcttcagggttgggtgctgaaaattggccagtgtcccggcgaccattgcgcgcaaggcttctggtgatttggcctgggattgttcgttcatcccgactccttttttgtatagataaaccatcagctgatagtttacctgaagaatatagagaagtacttacttaacattttcccatttggtactatctaaccccttttcactattaagaagtaatgcctactatgactcaagtcgcgaagaaaattctggtgacgtgcgcactgccgtacgctaacggctcaatccacctcggccatatgctggagcacatccaggctgatgtctgggtccgttaccagcgaatgcgcggccacgaggtcaacttcatctgcgccgacgatgcccacggtacaccgatcatgctgaaagctcagcagcttggtatcaccccggagcagatgattggcgaaatgagtcaggagcatcagactgatttcgcaggctttaacatcagctatgacaactatcactcgacgcacagcgaagagaaccgccagttgtcagaacttatctactctcgcctgaaagaaaacggttttattaaaaaccgcaccatctctcagctgtacgatccggaaaaaggcatgttcctgccggaccgttttgtgaaaggcacctgcccgaaatgtaaatccccggatcaatacggcgataactgcgaagtctgcggcgcgacctacagcccgactgaactgatcgagccgaaatcggtggtttctggcgctacgccggtaatgcgtgattctgaacacttcttctttgatctgccctctttcagcgaaatgttgcaggcatggacccgcagcggtgcgttgcaggagcaggtggcaaataaaatgcaggagtggtttgaatctggcctgcaacagtgggatatctcccgcgacgccccttacttcggttttgaaattccgaacgcgccgggcaaatatttctacgtctggctggacgcaccgattggctacatgggttctttcaagaatctgtgcgacaagcgcggcgacagcgtaagcttcgatgaatactggaagaaagactccaccgccgagctgtaccacttcatcggtaaagatattgtttacttccacagcctgttctggcctgccatgctggaaggcagcaacttccgcaagccgtccaacctgtttgttcatggctatgtgacggtgaacggcgcaaagatgtccaagtctcgcggcacctttattaaagccagcacctggctgaatcattttgacgcagacagcctgcgttactactacactgcgaaactctcttcgcgcattgatgatatcgatctcaacctggaagatttcgttcagcgtgtgaatgccgatatcgttaacaaagtggttaacctggcctcccgtaatgcgggctttatcaacaagcgttttgacggcgtgctggcaagcgaactggctgacccgcagttgtacaaaaccttcactgatgccgctgaagtgattggtgaagcgtgggaaagccgtgaatttggtaaagccgtgcgcgaaatcatggcgctggctgatctggctaaccgctatgtcgatgaacaggctccgtgggtggtggcgaaacaggaaggccgcgatgccgacctgcaggcaatttgctcaatgggcatcaacctgttccgcgtgctgatgacttacctgaagccggtactgccgaaactgaccgagcgtgcagaagcattcctcaatacggaactgacctgggatggtatccagcaaccgctgctgggccacaaagtgaatccgttcaaggcgctgtataaccgcatcgatatgaggcaggttgaagcactggtggaagcctctaaagaagaagtaaaagccgctgccgcgccggtaactggcccgctggcagatgatccgattcaggaaaccatcacctttgacgacttcgctaaagttgacctgcgcgtggcgctgattgaaaacgcagagtttgttgaaggttctgacaaactgctgcgcctgacgctggatctcggcggtgaaaaacgcaatgtcttctccggtattcgttctgcttacccggatccgcaggcactgattggtcgtcacaccattatggtggctaacctggcaccacgtaaaatgcgcttcggtatctctgaaggcatggtgatggctgccggtcctggcgggaaagatattttcctgctaagcccggatgccggtgctaaaccgggtcatcaggtgaaataatcccccttcaaggcgctgcatcgacagcgccttttctttataaattcctaaagttgttttcttgcgattttgtctctctctaacccgcataaatactggtagcatctgcattcaactggataaaattacagggatgcagaatgagacactttatctatcaggacgaaaaatcacataaattcagggcagttgagcaacagggaaacgagttgcatatcagttggggaaaagttggcaccaaagggcaaagccagataaaaagtttttcagatgctgcggcagcggcaaaagcggagcttaagctgattgcggagaaggtgaagaaggggtatgtggagcaagcgaaggataattctttgcaaccttcccaaacggtaacgggctctctcaaggtagcggacttatccaccattattcaggaacaaccctctttcgtagcagaaacccgtgcgcctgacaaaaatacagatgctgttttaccgtggctggcgaaagatattgctgtcgtttttccgcccgaagttgtacacaccacgttaagtcatcgccgctttcccggagttcctgttcagcaagcagacaaattgccccaattacgtcgcttagcctgtagtgtgtcgcaacgggataataaaacagccacatttgacttcagcgcctgttctttagaatggcaaaacaccgtcgcccaggcgatcagtcagatcgacggcctgaaaacaacacagttaccatcaccagtaatggctgtactcacggcacttgaaatgaaatgcacaagatataaagtgcgtgaggatgttatggatcagatcgtccaggaaggcggtctggaatatgctactgatgtaataatacaccttcaacagattgatattgaatgggattatgcgaataatgtcattattattctgccgtctggcattgcacctagctacttggagcaatattccagatttgaatgacgcctacgtaaacatttatcactgacggaagagtctctctggcaaaaatgtgcacaaaaacttattgccgcaattccacatattccagaatggcggcaaccattaattgctttgttattacccgaaaaaccagaaattgcacatgaaattgcccagcgtctactggggcaaaaaaaattaccctcgcttgagtggttaaaaatagtggcgactgatgagcacattcttgcctcattagaaaaatatcacgaaccatatgccatttttgatgattactattgtggtgcgatatggtcagccaccgtattacaggagcaaggtgttgcagccctgccccgatttgctccctatgccgcaagtgactactgcgccgatgtgttgcgtcatatcaatcatccgttcgcattgacactgcttatacgtgtagccgggcaaactaaacgctgtcacgatcggatgacgaaagccattgctgcgttcccacatgcagcaatggcggcactgacggaacttcttgggcaaaaagaagagaacagttggcgcattatgctaatgacaatgcttatctcacaaccagcactggcagaacaggtcattccctggctctcgacacccgcagttgccgtactgaaatcatgccagcaacaactgacacagccctcaaaccatgccagcgccgatctactgccagccgtagtagtctcccctccctggctttcgaaaaagaaaaaatcgccgattccggtgctggatttagcgccattaggcattgagccaatctgttatctgacagaagaaatcagtaatcaacttttggcgaaatatatctggtattcaaaacacatcacggttagccatgaagaaagtactaccaacctgttggcaaggatgggttttcaacgacggatcgctggtacatatattaaagctcccgaagcggtagttgaggcatggctaaatgaagattattcaaccttactaagtgaatttaaggtgtttcattcacctaccgggcattattggcagttggggattttgacaacattgccgctggagaaagcagtaaaagcatggaatgcccttaccctatctccacataccgataccgaatactccatgttacattttggactcaaagggttacctgggttagtaaactcacttgcacgctatccacaagaagccttgcccatcacgaattacttcgcagcgagtgagctggctcctgccgtcgcccgtgccttcaacaaactgaaaacgctacgcgaaaacgcccgtagctggctgttgaaatacccggaacatgcccttaccggcctgctgcctgcggcgctcggcaaagccggtgaagcacaggataacgcccgcgctgccttgcgtatgcttaccgaaaacggtcatcagccattactgcaagaaatcgcccgacgttataaccagccggaagtaaccgatgcggtgaacgctctgcttgcgctcgatcccttagataatcacccgacaaaaatccccactcttccggccttttatcagccatcgctctggacgcgcccggtattaaaagcaaatgcccaatcactgccagatagcgccctcctccacctcggtgaaatgctccgcttccctcaggaagaggctctgtatccgggattattgcaggtgaaagacgtctgttccgccgactcactggcgggatttgcctgggatctgtttaccgcctggcagaccgctggcgcgccgtcgaaagagagttgggcgttcactgcgttaggcgttctcggtaacgatgacaccgcccgcaaactgacgccattaatacgcgcctggcctggtgaatcccagcataaacgcgccaccgttgggttggatattctcgctgctatcggtagtgatatcgcccttatgcagcttaacggcatcgcccagaaactgaaattcaaagcattacaggagcgggcaaaagaaaaaattgccgacattgccgagagccgcgaactcacggtggcggagcttgaagatcgggttagcaccggatctcggtctggatgataacggttcgctgctgctggattttggcccacggcagttcaccgtcagctttgatgaaaccttaaaaccgtttgtgcgtgatgtttccggcagccgcctgaaagacctgcccaaaccgaacaaaagcgatgatgaaacgcgggcgaacgatgcggttaaccgctacaaattgctgaaaaaagatgcgcgtaccatcgccgcccagcaggtagcaaggctggaatccgccatgtgcctgcgccgccgctggtcgctggaaaacttccagctcttcctggttgagcatccgctggttcgtcacttaacccgccgtctgatttggggcgtttatagcgccgaaaaccagctactggcttgctttcgcgtagcagaagataacagctccagcaccgctgacgatgatcttttcaccctgccggaaggcgatatctctatcggcactcctcacgttctggaaatatcaccaacggatgctgccgcctttggtcagctttttgccgactacgaactgctaccaccgttccgccagctcgaccgtaacagctacgccctgacagaagccgagcgcaatgccagtgaactgacccgctgggcaggcagaaaatgcccgagtggtcgggtcatggggctggcgaataaaggctggataaagggcgaaccacaggatggaggctggatcggatggatgatcaaacctttgggtcgctggtcgttaatcatggaaatcgatgaaggctttgcggtaggcatgtcgccagccgaactcagcgctgagcagctcttaagcaagctgtggctatgggaaggcaaagcagaaagatatggctgggggagtaattcaacacaggaagcgcagttctccgtaatcgatgccatcaccgccagcgagctaattaacgatattgaagccctgtttgaataaggaaagagcatggacaaggaattaccgtggctggcggataacgcccaactggaactgaaatataaaaaaggcaaaacgccgctcagtcatcgtcgctggccgggcgaaccagtgtccgttatcactggaagtctcatccagacattgggtgatgaattgctacaaaaagctgagaagaaaaaaaacattgtctggcgttatgagaatttttcactggagtggcagtccgccatcacgcaggccatcaacttgatcggcgaacacaaaccctcaatcccggcccggacaatggcggcgctagcctgtatcgcgcaaaatgacagccaacagttgctcgacgaaatcgtccaacaagaggggctggaatatgcgactgaggtggtgattgcacgccagtttattgcgcggtgttatgagagtgatcctctggtagtgacattgcagtatcaggacgaggattatggctatggttatcgctcagaaacctataacgaattcgatctccgactgcgtaagcatctctctctggcagaggaaagctgctggcagcgttgcgccgacaaactcattgccgcactaccaggaataaacaaagttcgccgcccttttattgcgctgatcctcccggaaaaaccagaaatagccaatgagttggtaggccttgaatgcccgcgaactcattttcattctaaggagtggttaaaagttgttgctaatgaccccacagcggtgagaaaactcgaacactactggagccaggatatatttagcgatcgagaagccagctacatgtcgcatgaaaaccacttcggctacgcggcctgcgccgcccttttgcgcgaacaaggactggcagccattccgcgcctcgcgatgtatgcccataaagaagattgcggcagtctgctggtacaaattaaccatccgcaagtcatccgcaccttgctactggtggctgataaaaacaaacccagcctgcaacgtgtagctaaataccataaaaacttcccccatgcgacgctcgccgcactggcagaactgctggcgttaacagaaccaccagcccgccctggttatccaatcatcgaagacaaaaagctgcctgcacagcaaaaagcacgcgatgaatactggcgtacgctgttacaaacgctgatggcatcgcagccacaactggcagcagaagtgatgccgtggttaagtactcaaccccagtcagtgctgaagagttatttatcggcaccgcccaaaccggttattgatggcaccgataacagcaatctgccagaaatcctcgtttcaccaccgtggcgtagtaagaaaaaaatgacagctccacgtcttgatttggcaccgctcgaattaactccgcaagtttactggcaaccaggcgaacaagagaggcttgccgccactgagcctgcccgttatttcagcacggaatctcttgcgcaacgcatggaacaaaaaagtggacgagttgtattacaggaactgggttttggggatgatgtatggctgtttctgaattatatactccccggaaaactggatgctgcacgcaattcactctttgttcagtggcattactaccaggggcgggttgaagagatcctgaatggctggaactccccggaagcacaattagcagaacaggcgctccgcagcggtcacatagaagcgttaattaacatatgggaaaatgacaactactcacattatcgtccggaaaagagtgtctggaacctgtatttattggcacagttgccgcgtgagatggctttgaccttctggctgcgtatcaatgagaaaaagcatctgttcgcgggtgaggactattttctcagtatcctcggattggatgcgctaccaggtctgctgttggctttttcacatcgtccaaaagaaacatttccgttaattttaaattttggcgcaacagaactggcgctgcctgttgcccacgtctggcgacgtttcgcggcgcagcgtgatctggctcgccagtggattttacaatggccggaacatacggctagtgcacttatccctcttgtctttaccaaacccagcgataatagcgaagccgcattacttgccctgcgtttactgtacgaacagggacatggcgaattgctacaaaccgtggcaaaccgctggcagcgtacagatgtatggtctgccctggagcagttgcttaaacagggtccaatggacatttacccggcacgcattccaaaagcccctgatttctggcatccgcaaatgtggtccaggccgcgccttatcactaataatcaaactgttaccaatgacgctctggaaattatcggcgaaatgctgcgctttacccaggggggacgtttttatagcgggctggaacaactgaaaacgttctgccagccacaaacgctggcagcttttgcctgggatctcttcactgcgtggcaacaagctggtgcccccgcaaaagacaactgggcatttctggcgttaagtctctttggtgacgaaagcacggcacgggatctgacgacacagatcctcgcctggccacaagaaggcaaatctgcccgtgctgtcagcggcctgaacatccttaccctgatgaataatgatatggcgctgatacagctgcatcatatatcgcaacgggctaaatcccgccccttacgtgataacgcggcggaatttcttcaggtggtcgcagaaaatcgcgggctaagccaggaagagctagcggacagattagtcccaaccctgggccttgatgatccgcaggcgttgagttttgattttggtccccggcagtttaccgttcgcttcgatgaaaatctcaacccggttatctttgatcagcaaaacgttcgccagaaaagcgttccccgtttgcgcgccgatgacgatcaactgaaagcgcccgaggcactggcccgactaaaagggctaaaaaaagatgctactcaggtgagcaaaaacctgctcccgcgtcttgaaacggccctacgtaccacccgacgctggtcgctggcagattttcattctctgtttgttaatcatccctttacccgtctggttacccagcgattaatatggggggtttatccggcaaatgaaccgcgttgtttactcaaagcctttcgtgtggccgcagagggggagttctgcaatgcgcaagatgagccaattgacctgcctgcggacgctctgattggcattgcccacccgttagaaatgacagcagaaatgcgcagtgaatttgcacagctttttgccgattacgaaattatgccgccttttcgccagttgtcgcgccgcacggtgctgctcacacctgacgagtcaaccagtaacagcctgactcgctgggaaggtaaatccgctaccgttgggcaacttatgggaatgcgatacaaaggctgggagtcaggctatgaggacgcatttgtctataacctgggtgagtaccggctggtccttaagttttcacccggttttaaccactacaatgttgatagcaaagcgctaatgagcttccgttctcttcgagtgtaccgtgacaataaatccgtcacttttgccgaacttgatgtgtttgatttgagtgaggcgttaagcgcacctgacgtcattttccattaaaacacagcgggcagtgatgcaactgcccgttatcaacacgacttaccagcggggaaagcgatgatcgtgcaaaaagagctggttgctatttacgattatgaggtccctgtacctgaagatccgttttccttcagacttgagatccataaatgctctgaattatttacaggttccgtctatcgactggagcgattccggctacgtccaacatttcatcaacgtgatcgagaagatgctgacccgctaataaatgatgcgttgatttatataagagatgagtgtattgatgagcggaaattacgaggtgaatcacctgaaactgtaatagcaatttttaatcgtgaactacagaatatattcaaccaagaaatagaataatatactctaaataattcaaattggtccgatccggcgcaacgtcccaatggcctggattataaatctcattatcttaattgcaacggggtccagccgtggttataattcgttcgttggaacacgatgttgcacaggctgtggtgttaggcctgaaaatagtaaataaaagaacctgcctcaccagcaggtttttttatttactgtgatctgctttccagatatttttcgctcaaacaactaatgcgccaaacatttattgcgcgtaaaatatcgtttatttcattaatacatttcagggatgaatatatgtcaccgcagaataatcatctgcagcgtccgcctgctgctgtgttatacgccgatgaactggcaaaattaaaacaaaatgataacgcaccttgcccgcccggttggcagttaagtttgcctgcggcccgtgcttttatccttggcgacgaagcgcaaaatatcagccgtaaagtggtgattagcccctccgctgtcgaacgtatgttagtcactcttgctaccggccgcggtttgatgttggtgggggaaccgggtaccgcaaaatctcttctttctgaattactggcaaccgctattagcggcgatgccgggttaaccatccagggcggggcatctaccaccgaagatcaaatcaagtatggctggaactacgccctgcttatcaatcatggtccgtcaacggaagcgctggtccctgccccgctttatcagggaatgcgcgacggcaaaatcgtccgtttcgaagagataacgcgtacaccgctggaagtgcaggactgtctgttaggtatgctttctgacagggtgatgacggggccggaactcactggtgaagccagtcagctctatgcgcgagaaggctttaatattattgccactgccaatacccgcgatcgcggcgtcaatgaaatgagtgctgcgctaaagcgtcgcttcgattttgaaacggtttttccgattatggatttcgcccaggagttggaactggtcgccagtgcttcggcgcgtttgctggcccatagcggtattccgcataaagtgcctgacgcggtactggaattactggtccgcaccttccgcgatctgcgtgccaacggcgaaaagaaaacgtcaatggatacactgacagcgattatgtccaccgctgaagccgtgaacgtggcccatgctgtgggcgtccgcgcctggtttttagcgaatcgcgcgggggagcctgccgacctggtggaatgtattgccggaaccatcgtcaaagataacgaagaagatcgcgcgcgtctgcgccgttacttcgaacagcgtgtcgccacacataaagaagctcactggcaggcttattatcaagcccgccaccgcctgccgtgaggaaagatgcatgagcgagccgttaattgtcggcatccggcatcatagtccggcctgcgcccggctggtgaaatcgttaatcgaaagccagcggccacgatacgtgttgattgaaggcccggctgattttaatgaccgggtagacgaactgtttttagcccaccagcttccggtagctatttacagttattgccagtatcaggacggtgcagcccccgggcgtggtgcctggacgccatttgctgaattttcgccggagtggcaggcgctacaagccgcacgtcgcattcaggcacaaacttacttcatcgatttgccttgctgggcgcagagtgaagaagaggacgattcgcctgatacgcaagatgaaagccaggccttactgctgcgtgccacccgcatggataacagcgataccctgtgggatcacttgttcgaagatgaaagccagcaaactgcattaccctctgcgctggcgcactattttgcccaactgcggggcgacgcctccggcgatgcgctcaatcgtcagcgcgaagcctttatggcccgctggattggatgggcgatgcagcaaaataatggcgacgtgttagttgtctgcggtggctggcacgctccggcactggcaaagatgtggcgcgaatgccctcagaaaattaacaagccagaattgccctcgctggcagatgccgttacaggttgttatctcacaccctacagtgaaaagcgccttgatgtgctggcaggatacctttcaggaatgcctgccccggtatggcaaaactggtgctggcagtggggcttgcagaaggccggtgaacaactgctaaaaactatccttacccgtttgcgccagcacaaattgcccgcttctaccgcggatatggctgccgctcatctgcatgcgatggcgctggcacagttgcgcggtcatacactaccgttacgcactgactggctggatgccatagcaggctcgctgattaaagaagccctgaacgcgccgttgccgtggagctatcgcggcgttattcatcccgataccgatccgattctgctaacgttgatagacacattagcgggtgacggattcggtaaacttgccccttctacgccacaaccgcctctgccaaaagatgtcacctgcgaactggaacgtaccgcaatctcccttccggcggagcttaccttaaatcgctttacccccgatgggctggcgcaaagtcaggtgttacatcggctggcaatactggagatccctgggattgtacgccagcagggaagtacactgacacttgcaggcaacggtgaagaacgctggaaattaacccgcccgcttagccagcatgcggcattgattgaggccgcctgttttggtgccacactccaggaagccgcacgcaataaattagaagccgatatgctggacgcgggcggaatcggcagtatcaccacatgtcttagccaggcggcgttagcgggtctggcgtccttcagtcaacaattactggagcaactcacactattaatcgcccaggaaaatcaatttgccgaaatgggccaggcgctggaagtgctttatgccttatggcggctggatgaaattagcggtatgcaaggcgcgcagatattacaaacgacgttatgcgcgactatcgatcgcacgctgtggctgtgtgaatctaacggcagaccggatgaaaaggagtttcacgctcacctgcatagctggcaagcgctttgccatattctgcgcgatctacatagcggcgttaatttacccggcgtttctctttctgcggcggtagccttactggagcgacgcagtcaggcaattcatgccccggcgctggatcgcggcgcggctcttggcgcactaatgcgtctggaacatcccaacgccagtgccgaagcggcgctgacgatgctggcgcagttatccccggcacaatctggtgaggcgctgcacggtttgctggcgctggcccgccatcaactggcctgtcagccggcatttatcgccggtttcagcagtcatttaaatcaactgagtgaagccgattttattaacgccctgcccgatttacgcgcggcgatggcctggctaccaccacgagaacgcgggacgctggcgcatcaggtgcttgagcattatcaactggcgcaacttcccgtttcggcgctgcaaatgccgttgcattgtccaccacaggccattgcacatcatcaacaactcgaacagcaggcactggcatcgctgcaaaactggggagttttccatgtctgaactgaacgatcttctgaccacccgtgagctacaacgctggcgattaattcttggcgaagcggcagaaacgacgctttgtgggctggatgacaacgcccggcagatagaccacgcgctggagtggctgtatgggcgcgatcctgaacggctccagcgtggtgaacgttccggtggattaggtggctcaaatctcaccacccctgagtggatcaacagtattcacacgctgtttccgcagcaggtgattgagcggctggaaagcgatgccgtgctgcgctacggcattgaagatgtggtgacgaatctcgacgtgctggaacgtatgcagccttctgaaagcctgctacgcgctgttttgcacaccaaacatctgatgaaccccgaagtactggctgccgcccgccggatagtgtgccaggttgttgaagaaattatggctcgactggcaaaggaagttcgtcaggctttttctggtgtccgcgatcgccgtcgccgttcatttattccactggcgcgaaactttgatttcaaaagtactctgcgcgccaacctgcaacactggcacccgcaacacggcaagttgtatatcgaatccccccgctttaacagccgcattaaacgccaaagcgaacaatggcaactggtcttactggttgatcaaagcggatcgatggtcgattcggtgatccactctgcggtgatggcggcctgtttgtggcagttacccggcattcgtacccatctggtggcgtttgacacaagcgtcgttgatctcacggcagacgttgccgatccggtagagttattaatgaaagtacagttgggcggcgggaccaatatcgccagtgccgtggagtatggtcggcaacttattgaacaaccagcgaaaagcgtcattatcctcgtgagcgatttttacgaagggggttcatcatcattactgacgcatcaggtgaaaaagtgtgtccagagcggcatcaaagtgctgggactggcagcgctcgatagcaccgcaacaccttgctatgaccgcgatacggcccaggcgctggttaatgtcggcgcacaaatagccgccatgacgccgggcgagctggcatcatggcttgcggagaatcttcagtcatgaattcactacgtccggaattattagaactgacaccgcaggccctgacggcgttaagcaatgccggttttgttaagcgcagtcttaaggaactggaaaatggcaacgtcccggagatcagccatgagaacgacgctttaatcgccaccttcagtgacggtgtccgtacccagctggcgaacggccaggcactgaaagaggctcagtgcagttgcggggccaacggtatgtgccgtcatcgcgtgatgctggtgttaagttatcaacgactttgtgccaccactcagtctacggaaaaagaagaagagtgggatccggcaatctggctggaagaactggctacccttcccgatgctacccgcaaacgcgcacaggcgctggtcgctaaaggcatcaccattgagttgttctgtgcgccgggtgaaattccctctgcccgcttaccgatgagcgatgtgcgtttttattcccgcagcagtattcgtttcgcccgttgtgattgtattgaaggcacactttgcgaacatgtcgtactggcggtacaggccttcgtcgaggccaaagcgcagcaagcagaatttaaccatttaatctggcagatgcgcagcgaacacgtcacatcatctgacgatccgtttgccagcgaagaaggcaacgcgtgtcgtcaatatgttcagcaattaagccagacattatggcttggcggcatcagccagccgctcatccattacgaggcagcattcaaccgcgcattgcaggcggcagagacctgcaactggcgctgggtgagtgaatcgctacggcaactgcgcgccagcgttgatgccttccacgcccgcgccagccactataatgccggagaatgcttacatcagcttgcggcattaaacagtcgattaaattgcgcacaagagatggcccggcgcgacagtattggtgaagttcctcctgtgccgtggcgcacggtcgttggctctggcattgccggagaagcaaagcttgatcatctgcggctggtgtctttaggtatgcgttgctggcaggatattgagcattatggtttacgcatctggtttaccgatcccgacaccggcagtattttgcacctttcgcgcagttggccgcgaagtgaacaggaaaactcaccggcagctacgcgtcggctgtttagttttcaggctggcgcactggcgggcgggcaaattgtttcacaagcagcaaaacgcagtgccgatggcgagctgctgttagctacccgcaaccgcttaagcagcgttgtgccgctgtcgcctgatgcctggcaaatgttgagcgcgccgttacgccagccgggcattgtggctttgcgggaatatttacgccagcgtccccccgcctgcatacggcctcttaatcaggtcgataacttatttattctgccggtcgctgagtgtatttcgctcggttgggacagcagccgccagacgctggatgcgcaggtcattagcggcgaaggggaagataatgtgctgacgttatcattaccagcctcagccagcgcaccttatgccgttgaacgcatggcggcgcttttgcaacaaacagacgaccccgtgtgtctggtttctggctttgtcagttttgttgaagggcaattgacactggaaccacgggtgatgatgacaaaaacccgtgcctgggcgctggacgcagaaactacgcctgtggcaccgctaccttctgccagcgttttgcctgtgccgtctactgctcatcagttgctgatacgctgccaggcgttacttattcaactgctccataacggctggcgctatcaggaacagagtgctattggtcaggcatagttgctggcgaatgacctcaccgcggtgggtttttatcggctggcacatgtgttgggacaatttcgtaatacagaaagcgaggcacgggtagaagcaatgaataacggtgttttgctttgcgaacaattattccccatgcttcagcaacaaggatgaaatagtgctttttactaagagttctactccagttccggactgctcacgccacggtattaggcatatcctatatagcccctggtgagagtcaccagttccttgattaaataaaatggagttttacatgaaggctttcaataagctgttttccctcgttgttgcatctgttctggttttctctcttgctggctgcggtgacaaagaagaatcgaagaaattcagcgccaatctgaacggcactgaaattgccattacctatgtctacaaaggtgacaaggtgcttaagcaatcttctgaaaccaaaattcaatttgcctccattggtgcaaccaccaaagaagatgctgccaagacacttgagccgttaagcgccaaatacaaaaacatcgcgggtgttgaagaaaaattaacctataccgatacctacgcgcaggaaaacgtgactatcgatatggaaaaagtggattttaaagccctgcagggtatttcaggaatcaacgtttctgctgaagatgccaaaaaaggtatcactatggcgcaaatggaactggtgatgaaagccgctggttttaaagaagtgaaataatcggttggcggtcatgctctaaacatgaccgccaattttttagccttttttcacatgctggcgcgctgccagtccacgcagaaaataacgtaaaaattgatcgccgcattcgcggaagtttttatgatccggtgcgcgcatcatcgctgtaatttccggcatcgaaacgcggaactgctgttcggtgaggatagccagaatgtcatcggttttcagcgaaaacgcgatgcgtaattttttcagcacgatgttgttattaatgcgacgttccggctccagtgccggagcagactcatccttgccgcgtttttcataaatcaggccattgaggaatgacgacaaaacaatgtccggacaacgctgaaaaccctcttcgtcttctttacgtagccagacggcgatctgttccgcggtggcttcgacattacccagcgccagaatacgcaccaggtcattattattggctttcaaaatgtagcgcacgctgcgcagaatatcgttacttagcatgaggccttcaggtgttgatgaggcaaaaagccattttagcagtcttttacaggccaatcgcctcttttaagcttttcagataacggcggctgaccggcacggttaagccattacgcaaaatcaactcggcctggccgttatcttccagacgaatctcctgtaaatgcgcgaggttaaccagatactgacgatggcagcgcagtagtggtgtacgactttccagggtacgtaatgtcaattcggtaaagccctctttcccttcgtggctggtaacgtagacaccgctcatccgactgctgacaaatgccacatctttcatttgcagcaaataaatccgactatgccccgtacaagggataaatttcagcgcctgttgattttccggtaacagcgaaacatcctgcttgctgcgctcctgacgcaatcgcgccagcgttttctccagtcgcgcttcatcaattggcttcagcagataatcaaaggcatgttcttcaaaggctttaattgcgtattcgtcaaacgcagtgagaaaaacaatatacgggcgatgttccgggtcaagcatccccaccatttccagaccactgatgcgcggcatctggatatcgagaaacagcacatccgggcgcagtttatgcaccgcgccgatcccttccacggcgtttgaacactctccaacgatttcaatatcgctctgctcctgcaaaaatacacgcaggttctcccgtgctaacggttcatcatcgacaattaagactttaatcatgcctcgtccctccatggtagtcgtaacgttattcgggtgtaactatcaggctcacaggcgacgcttattccatagtcatcgccaaaccgttcacgtaaacgcttatccaccagattcatccccagcccactggcattggttaccggttgatacaaaccggcattgtcttcgatctccagcatcaaatgttgcccctcacgtcgggcgctgattgccactcgccctgtatccagcagttgtgatgtcccatgtttaatggcgttttccactatcggttgcagggtaaacgcgggcaattgctgctgggataattcttgcggaatagcaatgttgacctgcaaccgcgactggaagcgcgccttttcaatttgcagataagcattcacatgttcaatttcgtcggcgagagtaacaaactccgaaggccgctttaagtttttgcggaaaaaagtggaaagatactgcaccagctggctggcctgttcgctgtcgcggcggatcaccgctttaatggtgttaagcgcattaaacaaaaaatggggattcacctgggcgtgaagcagtttgatctctgactgggtgagcatcgctttttgccgctcatattgcccggcaaggatctgcgccgaaagcaattgcgcaatcccctcacccaacgtgcggttgattgaactgaataaacggtttttggcttcatacaatttgatggtgcccatcacccgctgattttcaccacgcaacggaattaccagcgtcgaccccagtttgcattgcggatgcaaagagcaacggtaaggtacttcgttgccatcagcgtagaccacttcaccggtttcaatcgcttttaaagtataagttgaagaaatcggtttgccgggtaaatggtggtcgtcaccaattccggtaaaggccagcaatttctctcgatcggtaatcgcgactgcaccaatatccagttcctgatacagcacctgagccactttcatgctgttcacttcgttaaacccctggcgcaaaatgccttccgtcgaggctgccactttcagcgcagtggcagaaaaagccgaagtgtatttttcaaacatcgcgcgtttatcgagcaatatacgcataaacagcgccgcgccgacggtattggtgaccatcattggcgcagcaatattactcaccagacgcaccgcatcttcataaggtcgggcgatcgcaaggatgatcagcatttgcaccatttcagcgacgaacgtgacggcaccggcggtaatggggttaaagactttatcagtgcgcccgcggcggatcaggatgctgtgtaccaggccaccgagtaatccttcaacgatggtcgagatcatgcaacttaacgcggtcatgccccccatcgaatatcgatgtaagccgccggtcagcccaaccagcccaccgacgaccggaccgccgagtaagccgcccattaccgcgcctatcgcacgggtattggcaatagaatcgtcaatgtgcaacccaaaccaggtgcccatgatgcagaagatggaaaagacgatgtagcagagaaatttatgcggcagacgaaccgtgacctgcattaacggtatgaataatggcgttttactcattaaccatgcaatgactaaaaaaacgcacatctgctgaagcagcagcaacaccagattaaaatcgtacatacccgcaaaccacacttccctttaaaacgcgtaacatacattgcctgcgtttaactttctttgaactcttgcagaaaaatgagaattcgtgagtacgatcactcaaaatcgcctggcaaaaataaaatcaccctatagatgcacaaaaaacgggcaaaactacctggttcgcaaaactgcgtctaaagttaaaccgggacctcgcgagcaagggtgagacgatggcgctttacacaattggtgaagtggcgttgctttgtgatattaatcctgtcacgttacgcgcgtggcagaggcgttacggattgctgaaaccgcaacggacagacggcggtcatcggctgttcaacgatgccgatattgaccggatccgcgagatcaaacgctggatcgacaacggcgtgcaggtcagcaaagttaaaatgctgctcagtaatgaaaatgttgatgtgcagaacggctggcgcgatcagcaagaaacattactgacttacctgcaaagcggcaatctacatagcctgcgaacgtggatcaaagagcgcggtcaggattaccccgcccagacactcaccacacatctgtttattcctctgcgccgacggcttcagtgccaacaaccgactctccaggcgctgctggcgatcctcgacggcgtactgatcaactacatcgccatttgtctggcttcggcacgtaaaaaacagggtaaagatgcgctggtggttggctggaatattcaggataccacccgtctgtggctggagggctggattgccagtcaacaaggatggcgcattgatgtcctcgcccactcgctcaatcaactacgccctgaactattcgaaggccgtacattgctggtgtggtgcggtgaaaatcgaacctccgcccaacagcagcaactcaccagttggcaagaacaaggccatgatattttcccactcggcatttaatgattcgttaacaaatgcgctttactgtacaatcctttcgttaacataaggagtgcattatgcgcatagctaaaattggggtcatcgccctgttcctgtttatggcgttaggcggaattggtggcgtcatgctcgcaggttatacctttattttgcgtgctggctaagcgcctgcaccagcctttcaaacaggcggtctgcgatgatcgccgccagtgccaccagtaacgccccctggatcacatacgcggtattaaatccgctaagcccgatgatgatgggcgtacccagcgtgctggcccctaccgttgaggcgatcgtcgccgtaccaatgttgataatcaccgaagttcgcacgcccgccagaatcaccggagccgccagcggtagctcgaccttacgcactcgctgaccacgactcattcccatacctttcgcaacttctgtcacgctggcatcaatcgctcccagcccggcaagtgtcgcctgcaggacgggcagcacaccgtaaaggatcaaggcgataatcgctggttgcagaccaaagccgatcaccggaacggcgatcgccagcactgcgacgggcggaaaagtctgtccaacggcggcaatagtttccaccagtgggcgaaattccgcgccccacgggcgagtgacagcaattccggcaccagtgccaatgatcaccgcaaacaaactcgaaattcccaccagccagaaatgagccagtgccagagctgcaaaactttcttgctgataaacgggtcgtggcagttgtgggaacaaggcagcaaacagcggctggctgtaaggcagccagaaaatcagcgccacaaacagagcaatgagccagaacagcggatcgcgcaacatcttcatacgcttacgcctccaccagcagatcctgaaaatgcagcgtgccgcaaggctggccctgcatgttcaccaccggcagcacctcgcatccccgcgcaacaaacagagagagcgcatcgcgtagcgtcatctcttctgccagtgcctcaccatctgctcgttcttcgcgacgcacgtaatccgccacactacgtaacgaaagcaggcgcacacccagttcactacgtccaaaaaactggcggacaaaatcattcgccggacgagtcagcatcgtcagcggattgccctgctgcactacttcaccgtgatccatcaataccagatgttctgccagccgtagcgcctcatcaatatcatgagtgaccagcacaatggtacgccccagcaaacggtgaatgcgcgtcatctcttgttgcaacgcgccgcgcgttaccgggtccagtgcgccaaaaggttcatccattagtaagacttgcggatcggcagccagtgcacgcgccactcccacacgttgctgctgaccaccggaaagctgatgcggataacgctcacgcaaatttgactccagccccagtagcgccattaattcgtcgatacgatcgtcaatccgcgcccgcgaccatttttgtaattgcggcacggtagcgatgttttgcgccacgctccagtgggggaacaggccaatagattgaatggcatagcccatccggcggcgcaactccagtactggcagcgagcgaatttcttctccggcaaagcggatctctccgctgtcatgctccaccaggcggttaatcattttcagggtggtggatttgccggagccagatgtgccaatcagcaccgaaaaactcccttcctgaaaattgagattgagatcgttaacggctttttgtgcgccgaacagtttgctgacatggctaaattcaatcattacgtttcaccttcagcagtgcgataagcaaatcgaacagcgcgtcggtaagcaccgccagaacaattaccgggatcacccccagcaacactaaatcaatggcgctgcttagcagcccctggaaaaccagcgcaccaaaaccgcctgcgccgattaacgccgcaatcaccgccatacctacagtttgcaccatcaccacccgcaggctgcgcagaaataccggtaacgccagcggtaactgaacatgcaggaaacgctgcgccccgctcatccccatcgctctggcgctttccagcacatcgcgcgggatctggttcaaaccgactaccacgccgcgcaccagcggcagcaaggcatagagcaccagcgcaatcagtgcgggtgtcattccggttcctgctatgccgagcgtccccagccacggaaaggccgtaaccagcgcggcaagcggcgcaatcaacaggccaaagagcgccaccgaaggcacggtctgaatcacattgagcagagaaaaaattgccccctgccgagcagtggaaaagtagcaccagatgcccaacggcacaccaatcactaacgcaggcagcaccgcaccaaacagcaacgtcagatgttgtgccagcgcgtcgtcaaacacatcctgacggttggcgtattctttcattagtgagagatcgttaagcgtgccggagtacagcaaccacagcggaataatggcaatctgcatatgcaacaaccagcgccacagcggatgcgtggagattcggcggatggcatcgctacaggccagcaatgccagcgccgcagccagccagaaaccactgccgaggctggtacgcgccagcgcactgccattttgcgccagttgggtcgccgcctttccagctccccacaccagcaatacgaagacgaattgcgccagaatgagtgcacaaatgctgccttttttaccgggaataaaacaggccgtcagccaggcgcaaccaacgcccaccagcatccagatcgtttgcggccacagctgccagagatgacgcccctcacccgaaactaaacgattaggcgcgtaactgataaacggcagcgccgctgcgattgccgtcagcaacagcagcagcgccagaacaggattaatacggaaataagtcacgggaaattacttcgtccaccctttttgtttcaggtagtcggcagccacttttttggcatccagtccttccacagcaatgctggcattcagttgctgcaatgtttttgcatcgaggctggcgaagactggctgtagccactgtgccatttgcggatactccctcaacaccgactcacgcaccactggtgcaggcgcgtagataggttgcacaccttgcggatcgcttaaggtttgcagccccagcgccgctaccgggccgtcagtgccgtaagccattgcagcattaacgccagaggtttgctgggcagcggctttgatcgtcaccgccgtgtcgccaccagccagtgacagcaactgatcctgaccgagcttaaagccataggctttttcaaacgcgggtaacgcatcggcgcgttcgataaactctgccgaggctgccagtttgaaggtgccgccctcttgcagataacgactcaggtcggcaagcgaagtgagtttatttttctctgccacatcctgacgcacggcgatagtccaggtgttatttgcaggcgcgggcgtcagccagattaacttgttgtgctccgaatcgagctttttgactttctcgtaaccttgctgcgcgtttttccacgctgcatcgttttcatctttaaagaagaaagcgccattgccggtatattccggatagatatccagttcaccggaagtaatcgccccgcgcaccacaggagtcgttccgagttgcactttattcaccgtcggtacgccgtggctttccagcacctgcaaaatgatattgccgagtagcgcaccttcggtatcgatttttgaaccgactttaacgggggaagccgcctgtagcggcaggctcacggctgccaacataaccagtgaacctgcccagagctttaagagtggcatgatgctttcctcattcttttactgttgttttcagcgaattaagagaaaagcatagttgataatggcggggttagcttgagcggaaggattcagttgcagaatcagataaatacttaagaggcatattcggtccggcgtttcctgccggatgcggcgcgagcgccttatccggcctacaaagggcgcaaacgtcgcgcccttactaaagcattacagcaactcaaactcgcctttcttaacgcgtgcggaatcagtgccgataaagacattgaacttgccaggctcggcgtcatatttcatctgttgattccagaacttcagcgcctcaatatcgatcgggaagctgacagtctgagtttcgcccggtttcagggtgattttctcaaagcctttcagctgtttcacagggcgactcatggaagccgtcacatcctgcaagtacatctgcactaccgtggcaccctcgcgcttaccggtgttcgtcacctgcacgctggcagtcactttgccgtcacgcttcatggtcggcgcagaaagtttcacatcagagacggtgaaagtggtgtagctcagcccatagccgaacggatacaacgccccgttagcttcatcaaaataacgcgaagtgtatttgttcggcttgtcggcattatacgggcgaccggtattcagatggctgtagtacaccgggatctgcccgacagaacgcgggaaggacattggcagcttgccggacgggttgtaatcgccaaacaatacatcggcaattgcattaccgccttcagtccccgcaaaccaggtttccagaatcgcatcagcctgctgatcttctttcaccagcgccagcggacgcccgttcatcagcaccagcaccagcggtttaccggtggctttcagcgccgcaatcaagtcacgttggctttgcggaatagtgatatcggtccggctggaggcttcgtgcgccatcccctgtgcttcaccgactacagccaccaccacatcagattgtttcgccgtctgcaccgcttcatcaatcatctcttgcggcgaacgcggatcgactttgaccgcttcttcatactgattcaggaaatcgataatgcctttgtcactggtaacgttcgcccctttggcatacagcactttaccgttttcaccgacggcatttttaatcccggtcagtacggtcacggattgatcggcaacaccggctgcggaccagctgcccatcacgtcacgtttactgtccgccagtggcccaaccaccgcaatggtggccgattttttcagcggtaacgtttcgagacggtttttcagcaacaccaagctttcgcgcgccacttcacgcgcttctttacggtgcaggcggctttcggcattggtatccaccgggtcagactctttcggccccaaatggctgtatgggtcgttaaacaaccccatatcatatttaacgttcagtacatggcgggcagcatcgtccagctctgccatcgtcactttgccggatttaatcaacccaggcagatacttcgagtagtactcgtcgctcatgctcatgttgattccggatttcagcgccacgcgcaccgcatcttccgggtctgccgccgtgccatgtttaatcagctctttgattgcaccgtgatcggaaacggtgatgcctttaaagccccactggtcgcgcagaacatctttcagcagccaggaatcggaggtggctggcgtgccgttcagcgagttcagcgccaccatcaccgcgccgctgcctgcgtccagccccgctttgtacggcggcatataatcattaaacaggcgctgcggactcatatcgacggtgttgtactctttaccgccttctaccgcgccgtatgcggcaaagtgtttgacgctggtcatcaccgagtagcgatctgccgggcttttaccctgcatcgcttccaccatggttttacccattgttgaggtgagatacgtatcttcgccaaaaccttcggaagcacgtccccagcgcggatcgcgcgagacatcgaccatcggtgcccaggtcatattcaggccatcatctgccgcttcataagcagagacacgtccgaccgttttcactgcatcgaggttaaaagacgaggccagaccgaggctaatcgggaacaccgtgcgctgaccgtgcagcacgtcgtaagcaaagaaaagaggaattttcaggcggcttaattccatcacctgatcctgcatggcgcggatatcctgacgggttacggtgttgaaaatcgccccaacctgaccgtctttgatcatctcgcggatcgcctctttcgggttatccgggccgacgctgattaagcgcagctgaccaattttctcatcaactgtcattttcttaagcagttcggtgacgaacgcatcccgcgcttcgggcgttaatggatggttgccgaataaatcatccgccagtgctggctgcagggccagactcaccgcgattcctactgaacatagccatttcatatggatttttcttcctttgttgcccgacgtggcagcgaaaatggtgcaaaaaccgtagtttgccataagcatgatggagagagaaaaagaatgctcagtttattgtctgaattttcaaaatattcactcgctgaattgttatacaaggcgctattctagtttgtgatattttttcgccaccacaaggagtggaaaatgtcttccatgacaacaactgataataaagcctttttgaatgaacttgctcgtctggtgggttcttcacacctgctcaccgatcccgcaaaaacggcccgctatcgcaagggcttccgttctggtcagggcgacgcgctggctgtcgttttccctggctcactactagaattgtggcgggtgctgaaagcctgcgtcaccgccgacaaaattattctgatgcaggccgccaatacaggcctgaccgaaggatcgacgccaaacggtaacgattatgatcgcgatgtcgttatcatcagcaccctgcgtctcgacaagctgcacgttcttggcaagggcgaacaggtgctggcctatccgggcaccacgctctattcgctggaaaaagccctcaaaccgctgggacgcgaaccgcactcagtgattggatcatcgtgtataggcgcatcggtcatcggcggtatttgtaacaactccggcggctcgctggtgcaacgtggcccggcgtataccgaaatgtcgttattcgcgcgtataaatgaagacggcaaactgacgctggtgaaccatctggggattgatctgggcgaaacgccggagcagatccttagcaagctggatgatgatcgcatcaaagatgacgatgtgcgtcacgatggtcgtcacgcccacgattatgactatgtccaccgcgttcgtgatattgaagccgacacgcccgcacgttataacgccgatcctgatcggttatttgaatcttctggttgcgccgggaagctggcggtctttgcagtacgtcttgataccttcgaagcggaaaaaaatcagcaggtgttttatatcggcaccaaccagccggaagtgctgaccgaaatccgccgtcatattctggctaacttcgaaaatctgccggttgccggggaatatatgcaccgggatatctacgatattgcggaaaaatacggcaaagacaccttcctgatgattgataagttaggcaccgacaagatgccgttcttctttaatctcaagggacgcaccgatgcgatgctggagaaagtgaaattcttccgtccgcattttactgaccgtgcgatgcaaaaattcggtcacctgttccccagccatttaccgccgcgcatgaaaaactggcgcgataaatacgagcatcatctgctgttaaaaatggcgggcgatggcgtgggcgaagccaaatcgtggctggtggattatttcaaacaggccgaaggcgatttctttgtctgtacgccggaggaaggcagcaaagcgtttttacaccgtttcgccgctgcgggcgcagcaattcgttatcaggcggtgcattccgatgaagtcgaagacattctggcgttggatatcgctctgcggcgtaacgacaccgagtggtatgagcatttaccgccggagatcgacagccagctggtgcacaagctctattacggccattttatgtgctatgtcttccatcaggattacatagtgaaaaaaggcgtggatgtgcatgcgttaaaagaacagatgctggaactgctacagcagcgcggcgcgcagtaccctgccgagcataacgtcggtcatttgtataaagcaccggagacgttgcagaagttctatcgcgagaacgatccgaccaacagcatgaatccggggatcggtaaaaccagtaaacggaaaaactggcaggaagtggagtaaaaattacggatggcagagtatcgccatccgaattcacttaatcgttctgtgccgtctgccccgccgccgccatttgggcggctttttgttttttatagctcaacgctgctgccggcacaggcatcactttaccggtttcaatccaggtacgcaggcggctggcatcggcaaaatgggtatatttgccaaacgcgtccatcactaccagcgccaccggtttattattgataaccgtacgcatcaccagacaatggcccgccgcattggtaaagccggttttggttaactgaatattccagttatcgcgatacaccagatgattagtattgcggaacggcagcgtatacgtcggattagagaaggttgccatatcttcccgggtagtacttaactgcccgatcaacggatattgtttgctggcaatgagcagtttggttaagtcacgggcagttgaaacgttatgcaccgacaatccggtaggttcaacaaagcgcgtgttgttcattccgagcgatttcgctttcgcattcattgccttaataaaggctttgtaaccaccgggataatggtgcgcaaggcttgccgccgcgcggttttctgaagacatcagcgccagcaacagcatatctttacggctgatttcgctattcagtcgtacgcgcgaatagacccctttcatctccggcgtctggctgatatccacttttagtttttcatccagcggcagtcgtgcatccagcacaaccatcgcggtcattaatttgctgatagacgcaatcggacgcaccagatccgggtggttcgaatagatcactttgttggtattcagatcaacaatcatcgcgctaccggaggcaatttccggttgtgaagcggtggtagcggctgccgttttcgcaacggcctgcggtgcaaaaggcacagccagcatcagggccaggctaaataaagaaactcgaaatttcggcatgatgagcattcagatagtggttcacgcgcacgggttgcgcaccgccggagtaaggatttactgaggctagcgacgccatcataacgagcaaaaagtgcgatcgtcaaaggagaatcgtgaggaaatgctgcattgctgacatttacgccagcaatgcaacgtcaaagaactttctagaacaaacgataaccgtagccccatagtataacggttagggcgagcagcacttccagtaccagcacgccaatcgccagcgtcgaactagagaagctaaggccttcctctttgttgatattcaggaagctcggaataccaaggtaaagcaggtagccggtgtaaaacagcgccaccgtgccgaccagcgcacacaaccagaccagtggataaagcgccaccagaccgcttaaaaacagcggagttgcaacgtagcccgcgaagaccatgcagtgcgcaagtgacggacgctgcggataattacgcgccatccaccagatgacccgccccatcaccgcgaccccagccagcataacgccgtaaaacaagacagccagcgccagtccggtaaaccaggataacttcaggatagtgccatcgccaaaattccagccaatctgtgtagtgccaatgaaggcgcaaatcaccggaatcgccgccatcagcaaaacgtggtgggtgtaatggtgagaaatcgtttcgttttcgcgattaatcacctgcatttcacgatcgggatgggaaaacagtccccagacatggctcataccgcccccttgttgtgagttcatgaacctgacagttcaagtataagtcagcttgtgattattttttgttcgcccatgtaattttcactgtctgatgaacgtcctttttcagcgtgaatgattcacagggtgtatgcttactggcaaccaaagggagacagactggcctatggatctcaatacacttatctcacaatatggttatgccgcgctggtgatcggtagcctggcggaaggtgaaaccgtgactttgctgggaggcgttgcggcgcatcaggggctattaaagttcccgctggtggtactttctgtggcgcttggcggcatgattggcgaccaggtgctctatctgtgcgggcggcggtttggcggcaagctgttacgccgtttctcgaaacatcaggataaaattgagcgggcgcagaaacttatccaacgccatccgtatctgtttgtcattggtacgcgctttatgtatggctttcgggtgattggcccgacgctgattggtgccagccagctgccgccgaaaatctttctgccgctgaatattctcggcgcatttgcctgggcgttgatttttaccactattggttacgctggtggtcaggtgattgcgccgtggttgcacaatctcgaccagcatttgaagcactgggtctggttgattctggtcgtggttctggtggtgggcgtgcgctggtggctgaaacgacgcgggaagaaaaagccggatcatcaggcgtaaaaccattgccctggataaggcgttcgcgccgcatccgacatccggagtaccatgcctgatacgacgcttgtgcgtcttttcatgccgaccaaaatattacccaatgaaatatccacgcacctcactgcgctattctgggttgaactgtggattcgccaacataaagccgccatccactatcaacgactgcccggtggtgtaatttgcgccctccgaacaaagccacaccaccaggctggcaatctcatgcgttgcgccaaaacgccgcaagggaatcgaaggctccgcgtcgggcttcacgtcgctgtcatccatgccattcattggcgtggcgatcgccccaggcgcgactgcgttcaccaaaatcttatgcctgaccagctccagcgccatcgctttggttaacccaccgagcgcatgtttagcggctgtgtaggcgctggcatccggcagcggcgtatgttcatgtaccgacgtaatgttgatgatgcgaccgccctgcccttgtttcaccatctgacgagccgcaatttgcgagcataagaatgcaccatcgacatcaacggtaaaaatcttgcgccactcatcaaaagccatatcaagaaacggcgctttggtcattgcacccgcattattcaccagcacatcaatgcgccccagccgttgaatgagtttctccagcgccagtgccccttctggtagattgccgagatccagctgcacgatctccgcacgtacgccgtggctaactacctcacgcgcggtatcttttgccccttcttcatctgagtgccaggtaataccaatatcaaacccctgctgcgccagtaataacgcgcactctttgccgatccccgaatcggaggcggtaataatcgcaacctgtgccatcgagttctccacttaacgctgaataaacgttaagtatagaaggcgcatatcatcagcgtttgtaccccccgcccaacgcaccagtgagttgaatggaggcatccagccactgcccttgcaataacaggccattggcccgctcacgcagcgcggggattctggcttcgctgacgcgggaaccagcaatgatgcccgcgttaaagcgcgcctgcgcaagacctaccacacgcaaggcatcgcgctcaatttgcgcctgatgctggtttttctccgccagtgtctgaacctgactggctgcccgcgccacgtcattcaccgcttcaaccaccgctttgttgtagctggcgatagacaagttgctttcggcttttgcgatatcgagattggcgttaagacgaccactatcgaaaatgggtagcgtcaggcctgccgtaacgcccatttgctgcgcggaatgacggaacagatcgcttaagtgcaacgcatcctgttgcaggaaggccatcaggttgatgtcaggataaaatgccgcttttgccgcatcaatggtgcttagcgatgactcaacgtaccagtgcgccgcctgcaaatctgcccgccgggccagtaaggagtaccccagttcatcaggaagctggcttgccactttcggcaacgcgaccggtttaagcttcaatgactttgtctggttatttgtaagtgcgcttaaccgtgcctcaataattttcattttccccgcgacatcgttgagctgctgccgggttttgctggcattaatatcggtttccacaccttcaactgaagaagtaatcccgttctgatatagctggcgatcggtcgcgataatggtgttctgctctttttctatttgctgcaagaccgtgtttaacgccgcctgggtttgccactcccagtacaggcgggctacgctgccagccagcaattggcgggtttgctcgcgttccgccgcccgtgctttaaccgtacccaggcgggcagtaacctccgcccgattctttccccagatatcgagatgccagcccgccgttaagccaaaagtaccgttggtgtaccacgggccggtcgtacctgcggccggatcgttcagagcaaacggccccattaagccttctgccgacattttttgccgctccatatccgccgaaaagtcgatctgcggaccatcctgagtggcaactgccttcgcctgggcttcagctagctgaatgcgctgttcagccacctgcatatccggtgcgttctgtagtgcattgttaattaaggaagtgagttgattatcgtgatactccagccaccattggctgtctggccaaccattttcagcgccgtgggtaatgcggtgtcaacttgtgcagcgggcgtttgctggcttaacgcctggcgggtttcatgcataggcgcacacccggccagcatcagtaacagcggaaaacaggcgatggctggataaaaggaatcacgattcatgggggaataatcaggtaagaaaaggtgcgcggagattaccgtgtgttgcgatatattttttagtttcgcgtggcaatacatcagtggcaataaaacgacatatccagaaaaatatacactaagtgaatgatatcttccgatttatcttaatcgtttatggataacggcaaagggcttcgttttttcctatacttattcagcactcacaaataaaggaacgccaatgaaaattatactctgggctgtattgattattttcctgattgggctactggtggtgactggcgtatttaagatgatattttaaaattaattaatgtcatcaggtccgaaaataacgagaatatttcagtctctcatcctgttgcgctcctgtcatgtgcattgcttcatataatcactggcgcaaggagcgcgcagggggcggccaatcgccgccgccccctgcacccccgggctctggcgaacaaaatcgccgctgcgcggtgccctcggcttatcccttacggctaccgggtcgggcgcgaggtaacatccctgtaaaacgcgccctcagcccacatccatgtgggctgccccggccttcagggaacgcctcggcaattttgacgccaccaaacaaccgtgcggcctattgataaagagctaacacattgtcaaaaaacatcactatggttttttagagtttctcgatatcaattgcctgaatagcccttgcaatatcaggggaattattcaacacccgaacatgctgaaataattccgttgcttcatcgtattctttacgcaaataactcaaccactgtttaatccgcgcaacgtgatataacccggtatcgccctgcttttccagacgggtatatttttgcagcaaagcaaccacctccggccacggcattcgcggttcgttatattttaccacccggctcaggttgggaatattgagcgccccgcgaccaatcatcactgcgtcgcagccgctgatcgccatgcattgttgcgcgctctgccagtcccagatttcaccgttggcaatcaccggaatattcagccgctggcgaatatcgccaatcgcctgccagtcaatatgctccgcgcggtaaccctgctctttcgtccgcccatgcaccaccagctccgtagcgccagcctgttgaaccgcatcggcgatttcaaatttcttctcaccgctgtcccagcccagacgcactttcacgctgacgggcaaatgcgccggtacagcttcacgcatcgcttttgcaccctggtagatgagttcaggatctttgagtaacgtcgccccgccgccgctaccgttaaccgttttcgacgggcagccgcaattgagatccacgccccaggaacctaactccaccgcacgggcggcgttctctgccagccattgtgggaactgacctaacaactgcacgcgcaccagcgtaccagatggtgtccggctggcgttttgtagctcagggcaaatgcgatgaaagacttttaccggcagcagttgatccaccacgcggacaaactcggtgatgcacagatcgtagtcgttaacttcggtcagcaattcacgcaccagagagtcaagcactccctccatcggtgccagtaacacacgcatatcatcacccgcaaaaaaatgaggcgctatgttagcgcctatggtcagcggattaaaggtctgcaaagagggattgctgcaaactgcaatccctctctatgcttgatgtatgcctgagttcgctgcgcattgcgtaatgccggggagcgaaaaaataagcgctgatttcttaatgtgatcggtagcacgttttacgaattaattgtatgatgaatccatctcatctggggtgttgattatgagtaagacactgaacattatctggcaatatttacgcgctttcgtcctgatttatgcctgcctgtatgcaggcattttcattgcttccctgctaccggtaaccattccgggcagcatcatcgggatgctgatcctgtttgtcctgctggccttgcaaattcttccggcaaaatgggtcaatccggggtgctacgtactgattcgctatatggcgctattgtttgtgccgattggcgtaggcgtcatgcaatattttgatttgctccgcgcacagtttggcccggtagtggtttcctgtgcagtcagtacgctggtggtttttctggtggtgagctggagttcgcaactggtacacggtgaacgtaaagtcgtaggtcagaaaggatcagaagaatgatggcgaatatctggtggtcattaccgctgacattgattgtcttttttgccgcccgcaaactggcggcacggtataagtttcccttgcttaacccgttgctggtagcaatggtggtgatcattccttttttaatgctgactggcatctcttacgacagctactttaaaggtagcgaagtgctaaacgatctgctgcaaccggcggtcgtcgcgctggcctatcctttatatgagcagctacaccagatccgcgcgcgctggaaatcgatcatcaccatctgttttatcggcagcgtggttgcgatggtgacggggacttccgtggcattgttgatgggcgcttcaccggaaatcgccgcgtcaatcctgccgaaatcagtcaccacgcctattgcaatggcggttggcggcagtattggcggtattccggcaatcagcgcagtttgcgtgattttcgtcggcatcctcggcgcggtatttggccatacattgcttaatgcgatgcgtattcgtaccaaagctgcgcgcggtctggcaatggggactgcctcgcacgccctcggtacggcgcgctgcgccgagctggattatcaggaaggtgcatttagttcgctagcgctggtgttatgcgggataattacttcgctgatcgcaccgttccttttcccgattattctggcagtaatgggctaaaatttgcgatgcgtcgcgcatttttgatgtatgtttcacgcgttgcataattaatgagattcagatcacatataaagccacaacgggttcgtaaactgttatcccattacatgattatgaggcaacgccatgcatccacgttttcaaaccgcttttgcccaacttgcggataacttgcaatctgcactggaacctattctggcagacaagtacttccccgctttgttgaccggggagcaagtctcatcgctgaagagcgcaacggggctggacgaagacgcgctggcattcgcactacttccgctggcggcggcctgtgcgcgtacgccattgtcgaattttaatgttggcgcaattgcgcgcggtgtgagcggaacctggtatttcggtgccaatatggaatttattggtgcgacaatgcagcaaaccgttcatgccgaacaaagcgcgatcagccacgcctggttgagtggtgaaaaagcgcttgcagccatcaccgttaactacacgccttgtggtcactgccgtcagtttatgaatgaactgaacagcggtctggatctgcgtattcatctgccgggccgcgaggcacacgcgctgcgtgactatctgccagatgcctttgggccgaaagatctggagattaaaacgctgctgatggacgaacaggatcacggctatgcgctgacgggtgatgcgctttctcaggcagcgattgcggcggcaaaccgttcgcacatgccttacagtaagtcgccaagcggtgtcgcgctggaatgtaaagacggtcgtattttcagtggcagctacgctgaaaacgccgcattcaacccgactctgccaccgttgcagggagcgttaattctgttgaatctcaagggttatgattacccggatatccagcgcgcggttctggcagaaaaagccgatgcgccgttgattcagtgggatgccacctccgcaacgctgaaagctctcggctgtcacagtatcgaccgagtgcttctcgcttaagcctggtgccggatgcggcgtgaacgccttgtccggcttgccagccctctcctggtgtcgaaattcccggcaaacagtttgccgtttcttgcgcaaaaccagcgggtaaagtagcctgatggaaattttccttagatcgagtctcctgcatgttaaagcgcgtgttcctcagcctgttagtcctgatcggcttgctgctgttgactgtgctcggcctcgatcgctggatgagctggaaaaccgcgccttatatctacgacgaattgcaggatctcccctaccgccaggtcggtgtggtgctcggaacagcaaaatattatcgtactggcgtaattaatcagtattatcgctaccgcattcaaggagcgattaatgcctataacagcggtaaggtaaattatctattactgagcggcgataacgcattgcaaagttataatgagccgatgaccatgcgcaaagatttaatcgctgctggtgtcgacccatcagatattgttctcgattacgcaggctttcgtacgctggattccatcgtgcgtacacgcaaagttttcgatactaatgatttcattattatcacccaacgtttccactgtgagcgagcattatttattgcgctgcatatggggattcaggctcagtgttatgccgtaccgtcaccgaaagatatgctgtcagtacgtattcgtgaatttgccgcccgtttcggtgcgctggctgacctttatatttttaaacgtgaaccgcgttttttagggccgctggtccctattccggctatgcaccaggtaccggaagatgcgcaggggtatcccgccgtcacacccgaacagttacttgaattacaaaagaaacaaggaaagtagttatggatgtacagcagttttttgtcgttgccgtttttttccttatcccgatattttgtttccgcgaagcatggaaaggctggcgcgcaggcgcgattgataaacgggttaaaaatgcaccggaaccggtgtatgtctggcgagcaaaaaatcccggactctttttcgcttatatggtggcatatatcggcttcggaattttatctatcggcatgattgtttatcttattttctatcgttaatattcccctctccagttaattattgagaataattattacttcacctgataagctgcggatatcacattcctaaccgcagctatttgtgaatcttttcacagtttaaattcccccgcacgcttagccttaatatcagtacattattatttactaaacgctcgccttaattacctatagcattaaggaagatcacatgccgcaacaaaattatctggatgaactcactccggcttttacgtctttactggcgattaaagaagcctctcgctgtttattatgtcacgacgctccctgtagtcaggcttgcccggcacagaccgatccggggaaatttattcgctcaatctactttcgtaattttaaaggcgctgccgagacaattcgcgaaaataatgccctcggtgccgtttgtgccagagtgtgcccgacggagaaattatgccaaagcggttgtacccgtgccggtgttgatgctcccattgatatcggccgcttacagcgttttgttactgattttgaacaacaaaccggaatggaaatttatcagcccggtactaaaacgctcggcaaagtcgcgattattggcgcaggtcctgccggattgcaggccagtgtgacactgacaaaccagggttatgacgtcacgatttatgagaaagaagcgcaccccggtggctggttgcgtaacggtattccgcaattccggttaccgcaatcagtgctggatgcagagatcgcccgtattgaaaaaatgggcgtgaccattaagtgcaacaacgaagtcggtaacacactcacccttgagcagctgaaagcagaaaaccgcgcggtactggtcaccgtggggttatcaagcggttccgggctaccgctgtttgagcatagtgacgttgagattgccgtcgacttcttgcaacgtgcacgacaggcgcaaggcgatatcagcattccacaaagcgcattaattatcggcggcggtgatgtcgcgatggacgtagccagcacgctgaaagttctcggctgtcaggcggtaacttgcgtagcgcgtgaagagttagatgagtttccggcaagcgaaaaagagtttaccagcgcccgggagctgggcgtttcgatcatcgatggattcacgccagtagccgtggaaggcaataaagtcacgtttaagcatgtacggttatcgggcgaactgacgatggcggcagataaaattattctcgccgtcggtcagcatgccagactagatgcctttgcggagttagagccgcagcgtaacaccatcaaaacacaaaattaccagacccgcgacccgcaagtctttgctgctggcgatattgttgagggtgacaaaaccgtggtctatgccgtgaaaaccgggaaagaagccgccgaggcgattcatcactatttagagggagcttgctcatgttaacgaaagatctttcgattactttttgcggcgtgaagtttcccaacccgttctgcctctcttcttcgccggtaggcaactgctatgagatgtgtgccaaagcctacgacacaggttggggcggtgtggtgtttaaaacgatcggcttttttatcgccaacgaagtctcgccgcgttttgatcatctggtgaaagaagataccggttttatcggcttcaaaaatatggagcagattgctgaacatccgttggaagagaatctggccgccctgcgtcggctgaaggaagattacccggacaaagtattgatcgcttcgatcatgggggaaaatgagcagcaatgggaggagctggcgcgcctggtgcaagaagctggcgcggatatgatcgagtgtaacttctcctgtccgcaaatgacttctcatgcgatgggtagcgatgtcgggcaaagcccggagctggtagaaaaatattgtcgggcagtgaaacggggttccacgctgccaatgctggcgaagatgacgccgaatatcggtgatatgtgcgaagtggcgctggcggcgaagcgcggcggcgcagatggcattgcggcgattaacaccgttaaatccatcaccaatatcgatcttaatcagaaaatcggtatgccgatcgttaacggaaaatcgagtatttccggatattccggtaaagcggtaaaaccgatcgccctgcgcttcattcagcaaatgcgcacccatccagaactgcgcgatttcccaatcagcggtatcggcggcattgaaacctgggaggatgcggctgagtttttattgctcggcgcagcaacgttacaggtgaccaccggcatcatgcagtacgggtatcggatagtggaagatatggcaagcgggttgtcgcattatctcgccgatcagggatttgattcgctgcaggagatggtaggtctggcgaataacaatattgtcccggcggaagatttagaccgcagttatattgtctatccccgtatcaatcttgataaatgtgttggctgtggacgctgttatatttcctgttacgacggcggtcaccaggcgatggaatggagcgagaaaacccgcacaccgcattgtaataccgagaaatgtgtgggttgtctgctttgtggtcacgtctgcccggtgggttgtattgagctcggggaagtgaagtttaagaaaggcgagaaagaacacccggtaacgttgtaaaaccagagacgcatccggcatttggttcctgtcgccggatgcggcttgaacgccttatccggcctacaaaaccatacaaatcagtatgttgagcttattgtaggccggataaaacgcgccagcgttgcatccggcatttggctcctgttgccggatgcggcgtgaacgccttatccggcctacaaaaccacacagatcatgatgttatgtgcgtttatgaccgaatgcggaccacattcacatcatttcttacgcgcgtatttcagtgaatccagcgctacggcgaagataataatcgcccctttgatgatgtactgccagtatgggtttacgccgatatacgtcaggccatagttgatgacggtaaaaataattaccccggtcaccacgccaatcaccgtccccacaccgccgctgaacgatacaccgcctaccacgcacgccgcgatagcatccagctcatacataaagccgaggttgttggtggcagagccgatacgtccggcttctaacatcccgccaaaggcatagaacacgccagacaacgcgtagatcatcagcaggttcaggccgacgttgacaccagatacttttgccgcttccgggttaccgccaatggcaaaaatgttcttaccgaagcgggttttgttccacaacacccagacgaacgccaccgcaatcaacgcgtagaaggtgatgtaagagagacggaaactccccagcgcgacaaagccctgagcaaaggtagagaagccactgtcaaaaccagaaattggcgacgccccgacaaagtcgtaatagagcgagttgatgccatagacgatgatcatcgtgccgagcgtggtaatgaacggcgtcacgttgagataagcgataatcagaccgttgatcaaaccgatcaccgcaccaatggcacagacaatcagaataaccagcgcaatcggcatcgtcgccatttccgggaacactttgttggcgttatccatggactgcaataatgtcgcagccaccactgccgccagccctacctgacgaccagcagaaagatcggtcccctgggtgacaattaaccctgccacaccgagcgcgataataatacgcaccgatgactgggtgagaatattacttaagttcaacagacttaaaaatgttgggtcctggaaaataataatcgccagcaaaactaaaagaacgacgtaaataccgccctctttcaggtaagtaagaaaacttttcttatttaacgcactcatgggaagcccctaatcttaaaggtgcaaagacgcaagacgcagaatttcgttttgcgttgttgtttttgtatcgacaattccggaaacgagaccattgctcatgaccagaatacggtctgttatccctaacaactcaggcatttcagaggagataataataatccccttgcctttcttcgccagttcggcaattaactgataaatttcaaacttcgccccgacatcaataccgcgcgtcggttcatcgagcattaatatttctggttgcgttagtagccagcgaccaataatcaccttttgctgattaccaccggagagcgaaccaatttgcgtccgatgacccggcgtttttacccgcatcgaatcaatcacccactgggtatcgcttttcatccgcgagttatccagtaaaccaactttatttttgtagttgcgaatattggaaattaacgagttaaaaccaatatccagataggcataaattcccgttgagcggcgctcctcagttaccagtgcaaatccatggtttatggcttcgttggcattatggttattgatctgtttgccgtgcaacgttatggtgccagccgatttctcgcgaataccaaataacgtctcaacaatatcggtacgtttcgcccccaccagaccggcaataccgaggatctcccctttatgcagatcaaacgagacatcgcgaatcgacggctggcgcagtgacgtcaggttacgtacctcgaggatgacttcgcccggtttgttttctttgtcagggaaacgctggttaagagaacgcccaaccatcatggcgatgatcttgtccatcgtcagtcctgccagcggttcggtggcgatccactgaccgtcgcgcaatacggtaacttcatcacataactggaagatttcttccattttatgcgagatataaacaataccgcagccgcgctcttttaatttacgaataatagtgaacagatgattgacctctttttcggttaacgaagaagtcggttcatccataatcacaattttcgcgttataggaaaacgctttggcgatttcgatcatctgcatttgcgaaacggataatgtgccgacgcgcgcacgcggatcgatatcaatatccagttcgtcaaaaatcgctttggtttcgcggtacattttgtcctgatcgacaaacatgcctttggtgggatatcgccccagccacatgttatccatcaccgaacgttgtaataccaggtttaactcctggtgtaccatcgaaataccattttccagggcttcttttgcagaatggaaatcgatctctttaccctggaataaaatggtgccggagtctttttgataaataccaaacaggcattttaataatgtcgattttcctgcaccgttttcccccattaatgcatggatagaatgtggccggacttttaaattaacgttatcaagtgccttaacaccaggaaaggacttgttgataccgctcatttccaacaagtattccccggaggacggagtcgttgagctgaccatataattttaccttgttggccatacaataagggcgcagtaatagactgcgcccaatcagtcttatttcttgctgaattcagccaggttgtctttatctacgccaacataaggtacgcggaccactttgttgtcgattttccagttggtgccatcagccgcacctttaccatcggccaggtttttcgccagatcaaaggtcgctttcgcctggttgttagcatcgttcagtacggtgcccgccagtgcaccggatttcaccagcgccagcgcttctggcagcgcatcgacgccaaacaccggaatgctggacttgttgtgtgctttcagcgcttcaaccgcgcccattgccatcgcatcgttgttggcgataaccacttcgattttgttggcgttcgggccagacagccaggcgtccatcttatctttcgcctgagcggtgtcccacattgcggtatctaactgtaactgttcagttttgatgcctttatcgttcaattctttaatcacgtaagtggtacgtgcttctgcatccggatggcccggttcacctttcagcagtacgaactgaatctgaccgtctttgttcagatcccaaccctgattcgccgcccagtgtttagcaatcaaatcgccttgaataatgccggactctttggagtcagtgccaacgtagtaggctttgtcgtagctatccagcgccttacgagacggttctttgttgaagaaaaccaccggcacgttttgcccacgcgctttctcaatcaccgtacccgcagctgccgggtcaaccaggttgattgccagtgccttcacccctttcgccagcaatacgtcgatctgatcgttctgcttggactggtcattctgagaatcattcatcagcagctgaacatctggcgcggctttcgcatcttgctcaatagccttgcgcactacagacataaagttatcgtcgtacttatagattgttacaccaatgcgagtatcagcagcgtgtgcagcggcaccgaataacatgctggccatcacagcagacagggttaacaccttcttattcatggtatctccggtttttcttatgcagggtagtgcttgagataaatgctcggcggggcagtagagttaatgaagtgttactgaacgccgaagctcactttttaaaattcgttcttccatgcccggtaacgctccagaaaacggctttaattgttgttatgacgctgttacctcggcaaaagtgattattcactgttacatacgggttacaacgttaaaacggtgcaatcatagctatcacattgttaagatactgtgaaatcactcacagattgaaagcggttacatcgcctgatttgttgagttagtgatcgccgccgcattctggcgtgttgcgacagaatggcgacgcactaacgtcggcataaaacagtggctggcacgaggatcaatattgcctgctgccccctgcaaggccagttcggtggctaatttcgccattgaagcaatgggataacgcacggtcgttaattgcgggtcggtgtaacgggcgatgggaatatcatcgaaaccgatgattgagagatgtaacggaatcgcaatgccattatcttttaatgctgtcagtgcgccagcggccatattgtcgttataagcaaatacagcggtaagttgtagattgcgccccagcagttcaaccatcgccgcctcaccgcccggcatgtccggcgtaccagcgccaatccagctttccggcggaataatatcctgctctttcaacgcactcatccagcctgctttacgcatggcgtcatcttcaatgccgtggctggaagaaagataaccaatacgttgatgaccgttattcagcaacatgcgcgtcgccattcgggcaccgctgagattatccaggcaaacgcaacgatgggcgtaccccggcacaacgcggttgattaacaccataccgggaatgttatccataaattgcgccagttcatcgtcactcaatgcttttgagtgaacaatcaacgcattacaacgctggcgaattaacacctcaatggcgtgacgctctttttccgcttcatgatagctattgccgattagcacgtatttctgatgctgctgagcgaccagatccaccgcttttaccagcgcgccgaaaaacgcatcagaaacgtccatcaccaccacgccaatggtgtcgctaacctgagttgccagcgcctgggcattggcgtttggccgataatccagctcactcacggctttcattactgcttcacgcgtgtcggcactgaccagcgtgctgttattgagcacccgggaaaccgttgccacagagacgccagcctgacgcgctacatcacgaatggtgatcatattcactacctgttatgagattgcagtaaatgactgcttgctggcggctattttgtcagcactgaatacaggacttcgtgaatcgagtcacagcaatggaaacggttacagccgttttgttaacgaatgtgatccagatcgttatcttgatgttttagatattgccggtccggcagcacgcaaagttaactgacgccagagccattccaccggcccctggcggaagtaacgcagccagataacagagaagaggatattcgccagccataccggaataacaaacgccagcagctccaggcggtcaaaatgcataaacaaaccgaggtggtaaaaaagcgtggtacaaatcagcgtttgcaatagatagttggtcagcgccatccgtccgacgcaggcgatcgcaagcaccagcttaaagcggctcaattgcggccagaagccataaaacagcgacgcatagccaatcgcctgaaacggcgcactcagttcccgcggcatttgaagtaagaaggcacaccagcgatacgcccagtccagctgccattgcagggcgatggcaggaaggttaatggtcaccccaatcgccaccagcacaaaaccagtacgacgatagtgacgtaagctgaactgccctttcagccagccgctgcgcatcagcgccgcaccaatgagcatcatccctgccagttgccagccatactgtgcgcccagtgccagtaaactgttgccaacaccatcggcacgattactgatcgcttcaacgccgccgtgaagcttccagtatttttcatacaaaatagccgatgcatccggcgtccaggcgcggctggtctggctgtcggaaatcagccccaataacagcaaaacgccaagccccaccagataaagcatgacgcctgtattaaacaggctttttaccgatggcgcatcgcgcaccagccgccagcagattaagcccaccagcccgtaagccagcaaaatatcgccgtcccagaacaataaaccgtgaataaagcccaacaagactaacagcgttaaccgcgactggatccagcgtctgccacggggcagcaacatttgcaggcccgcaccaaacagtagcgcaaaaagcgtgaggaatttcacctggccgatgagatcaagaaatgcccaagtccatgcatcccgcggcgtaatagcaccgtaccaggcgggattgagataagccgcctttggtagcccaaaggcgctgatgtttaatagcaggatccccagaatggcgacgccgcgaacaaaatcgagcgtgacgttgcgctccatggttcctgccttttaatcagttgtgatgacgcacagcgcgcagaaactcgtggcgcgtattctgactggatttgaacaatccaccaagagaggtcgttgtcgtggcactggttgcatcgcggatgccacgcgccttcacgcagtaatgcaccgcgtcgatcgagacagccacgttattggtgcccagcagcgtttgtagcgcaataagaatttgctgcgtcagacgttcctgcacctgcggacgctgggcaaagaactgcacaatgcggttaatttttgacagaccgatcaccgaatctttcgggatataggccaccgtcgctttgccatcgatggtaacaaaatggtgttcacaggtgctggtcagagtgatatcgcgcacggtgaccatttcatcgaccttcattttgttttcaatgagggtgattttcgggaaattggcgtaatccagaccggagaaaatttcatcgacatacattttagcgatgcgatgcggcgtttccatcaaactgtcatcagccaggtcgagattcagcagctgcatgatttcggtcatatgaccagcaataaggcttttgcgcgtttcgttatccatttcatgcacgggcgggcgcagcggtgtttccagtcctcgcgcaactaacgcttcatgaaccagggccgcttctttactgagtgatggcatttatgatttctcctgcaggtgtgacgcctccgccctgcgtgggggcaaagttattaagctgatttacagcctgattattgtgcgtgaggcggcgcacataatccagtattcacagcgataattattgtaattgccgctgcctttcatcagcagatgttaaaacatcgttatgcaaatacggaagtgaaagttactcacagcacattgaataaacggtatgatgaagaaattgcaaacaacacaacaaggagccacgcatggaaatgctcgaagagcaccgctgttttgaaggctggcagcaacgctggcgacacgactccagtaccttaaactgcccgatgacgttcagtatctttctccctccacctcgtgatcacactccgccaccagtgctgtactggctttccggattaacctgcaatgacgagaacttcaccaccaaggcgggtgcccagcgggtagcggcggaactggggattgtactggtgatgccagacaccagcccgcgcggcgaaaaggttgccaacgacgatggctacgatttaggccagggcgcaggcttttatcttaatgccacgcaaccgccgtgggcgacgcattaccggatgtatgattatctgcgcgatgaattaccggcgctggttcagtcgcaatttaatgtcagcgaccgctgcgccattagcggtcactcaatgggtggtcacggtgcgctgattatggcgctgaaaaatccgggtaaatacaccagcgtttcggcctttgcgccaattgtgaatccgtgcagcgtcccgtggggaatcaaagcgtttagcagctatttaggtgaggacaaaaatgcatggctggaatgggacagttgcgcactgatgtatgccagtaacgcgcaggatgcgatcccgacgcttatcgatcagggcgataatgatcagtttcttgccgaccagttgcaacctgcggtactggcagaagccgcgcgccagaaagcgtggccgatgacgctgcgtattcagccgggatatgatcacagttactacttcatcgcctcttttatagaggatcacctgcgcttccatgcgcagtatttactgaagtgaaagtccgcccggttcgccgggcatcttctcatcagaagcgataatccactgccataaagtaacgacgtccgtcttcgttatagctgtagtcgtcacgactgagatccttgtcgccaaggttcagcacgcctgcgcgcagtttgacgtctttagtcacctgccaggccgcgccggtattccagatggtataaccgcccggtgttttagccgtcgcgctgtcggcgcgtttctgcccggtatagtgcccagaaacatagaatgaccagtcttccagcgccagcggtttccagtccagcgtaccgttagcagtatggaacggcagatcggatagcggtttgttttcgccgttgctgacatcacgaccatcgttgtaggtgtagttgatcgacagtttccattcatcgttgaacggaattttcagttcggtttccacgccctgaatacgagctttgttaacgttgtagtagctaaataccggtatgcgccgtccgttagcgcccgtctcaaaaccaacaaagttttggtagcccggtgcagcgttgacgtcagacgtacggctgatgctgatacgatctttcacatcgttacggaaaacggtaacgctggattcaaccccttccagccagccttcttcacccatgtagtaaagccccagctcccaactttcgctggtttctggtttcagatccgggctacccacaatcttacatgcgccacggcaggaattgctcgtccagtcagggctaagttgcaacagagaaggtgctttaaatgccgtcgcccagccccctttcaccgttacggtgtcggtggcgttataaaccaggtaggcacgcggactccagtgttcaccgtaggtttcgtgatcgtccatacgcacgccggtcgtcagcgccagcggctcgaagatccgccattcatcttccacaaacagcgcgtactggctggcagacgttttggagctggttcccccggtcaggttcaccgcatcgctaagtttgtcgtgacgccattcaccgccaaccgtgagaaactgattaatcgccgtcagcggcaacgtgtatttgccgtcgaccgtattgctttcggaagttatcgggctgctgttgccagggtttttgttctcgactttctcaccgtagtatttcagttcgctggtgccgtaatcccaacgcccattatggctgacggagtagttctggcgttccaggcggtttttgtccagcgagtcggaatcacgatcctgacggtcgaaaccgtatccggcagtaaaatcgtgattttgattcggtgtccaggcaaattcgacattgccgtcgcggctggagaatccttcaatacgcggcgtttctccggtatcggtggtcgttgagttttgcgggtcatccttttcacgttttgccaggctgccgtaagctttcattcccagcacaccatcaattaatggtccactggtaaagaactgaccgttataggtgtcaccgcgatcgcgatgttcctgaatggtggtatcgacggtaacggtacccgaccatttctgaccgatttttttggtgatgatattcactacaccgccgagcgcatcggaaccgtacagcgacgacatcgggccacggaccacttcaatacgttcgatggaatcgaccgggatccagttcagatcgaaatcattgtggcggaagacggcattgcgggagttcacgcgtttaccgtcgacgagaatcagggtatagctgctgtccagaccacgaatactaacgcccttacggttatccccttcgttcgtcagttgtacgccaggcacttctttgaggacatccttcagattctgtaccggttttcgctgcaggtcttcctgggtaatgacgctgatactggcaggtgcatctttaagattttgttccacggaagatgcagtgacaaccatcgtttcgccatcatcatcgaccgctaacacaggccatgcacaagaaatagcggacaaacacagcccgacccgtacgaaagggttcaacctaaacattccatatctccatgaggtaactacgaaaataaaatgggttatcgctcacatcttcttcacgtccccttgcgtacggcagcatcgcggtggacttattttttatgcaggtgatcatcccagaaagccggaacagcctctgatttgtcagccttttttgattgcggcgtaacgataatgcaaacgataacaattatcaatccaaatgttaaattttatatccgcatgatttgtcagggaaatggaattgaaaaagccctctcggttgagagggcttagcaaggaagggaggaaacttatttcttatcgttctgcgggaacttcatttcgctgtagcgtacgaagtgagttcctttaatcagcttgtagccgaaccaaataatcaggaacagcgggataccaatatacgttgccgctacgccgccccagtcaatagtatctttcaggaacgcttcgtagttctggcccaaagtgataatcagacacagaatgaatgcgaagatcggccccagtgggaagaaacctgaacggtacggcagatcgttaatgtcgtgtccctgcaatacgtaaccgcgacggaagcgatagtggctaatggcaatccccagccaggcgataaaacccgtcatcccggaggtgttcagcagccacaggtataccgtctggttgccaaacatggaggtcaggaagcacagaccggcaatcaccgtcgtcgcatacagcgcattacgcggcacgccaccacgcgacagtttagcgaaaatgcgcggcgctttaccgtcacacgccagggtgtacagcatacgagtagacgcatacataccggagttacccgctgacagcaccgccgtcagaataactgcgttcatcaccgccgccgcagagagcagacccgcgtgctggaacaccagggtgaacggactaacgctgatgtctttaacatcgttacgcagcaggctcggatcggtgtacggaataatcaggctgataatcaggatcgcgaacacatagaacaacaggattcgccagaacacctgacgtaccgcgcgtggaatgtttttcgccggatcttcggactcgcctgcagcaataccgatcagctcggttccctggaaagagaagccgacaatcatagctacgccgatcatcgccgcaaaaccaccagcaaacggcgcttcgccgattgtccagttgctccagcccgcaggctgcgcgcctttgaagataccgataatcatcagcacgccaacgatgataaagacaataactgtcgtgactttgatcagtgagaaccagtattccgcttcaccaaagccacgaactgagatgtagttcagcaggaagataacgccgaggaacaacgcactccagatccagcccggtgtatccgggaaccaccagctcatgaccagctgagctgcaaccaggtcaacggcgatagtcaccgcccagttgtaccagtagttccagcccagcgcgaagccaaagccttcttcaacatagttctgaccgtaagtggcaaacgaaccggaaaccggcatatatgcagccagttcaccgagactggtcatcaggaagtaaaccatcaggccaatcagcatatacgagagcaatgccccgcccggacctgcctgagaaatcgttgcgccagaggcaacaaaaagacctgtaccgatggaaccgccaatggcaatcatcgtcaggtgacgcgcctttaattcacggcgtaagcccggcgcttctgtggttttagtttcggaaaccatacaaaaatgctatccatcttaaaaatgaggcgcgattgtagcagacgattggcaatccttccggcagaaatacacggttataagacaccttcatgatcgcccagggattataagtaaagcagccaatctcttttctggcgaatgcatgctgaaggcgctgcgtcacgaaatcgacacagcaccagcatgttcttgtacagcaacttaacgcggcacatttgcgggatcgcaatagtccagaaagcgccgtagcgcgttggaaaggtgtttttgccgatgatgtatacgccacaacgtacgcatcaggcgcggcagagggaccgcaacttcacttaatgtgcctgcctgcaattgatcttcaatcacacgtcgcgacaggcaactaattcccaacccatgacgcaccgcatgtttgattgcctcggagttacctaattccatcgccatctcaaacttcggtaaatgtgacagcaacagataatcgacaatctcccgcgtgccggaaccgcgttcacgcaggatccacggcgcagcggccagctgttctaaggtgaccggaccacgggccaacggcgaagtcggcgcggcgaaaaccaccagctcgtcttccagccacggttcagaaatgatttcagtgctgtggcacggtccttcaataaagccaatatcaacgcggaaatccagcaccgcttgcatcacgtcctggctattcccaacgctaagttcaatcggcaactgcggataatcatggcgataacgggcgataactgcaggcagaatgtagttaccgatggtactactggcatagatacgaatcgcgccgttgtcttcgcgaaacagttgttcgatttcaaccgcctgttcaagcaatgccaacgcacgcggatagagcagccgcccgtgttcattaacaaccagtcttttccccacgcgatcaaacagttgcacgccaagctgcccttccaggtcggtcaaggctgcgctcactgctgattgcgacaacgccagcatcaccgacgcctgggtggttgatccacttttcaatacttctgcaaaaacttccaactgccggagggtgatgtgcatagtcgcttaccacttataaagattaattataaatatataatcaattttatttttaaaccagttagtcgtaaccttatgcccggttaaaggagagggttatgacgaatatcaccttacagaaacaacatcgtacactgtggcattttattccggggttagccctgagtgcagttatcaccggggtcgccctgtggggtggttccattcccgcggttgcgggtgccgggtttagtgccctcaccctcgcaatcttgttggggatggttttaggcaacaccatctatccgcacatctggaaaagctgtgacggtggtgtgctgtttgccaagcaatatttattacgtctgggtatcattctttatggcttccgtctgacgttctcgcaaattgccgatgtcggtatcagtgggatcatcattgacgtgttgacgctgtccagtaccttcctgctggcttgcttcctggggcagaaagtgtttggtctggataagcacaccagctggttgatcggtgccggtagcagtatctgtggtgctgccgcggtactggcgactgagccggtagtgaaagcggaagccagtaaagtaaccgtggctgttgcaaccgttgttatcttcgggaccgtcgcgattttcctctacccggcgatatatccgctgatgtctcaatggtttagtccggaaactttcggtatctacattggttctactgtgcacgaagtggcgcaggtggtggcggcaggtcatgccatcagcccggatgcggaaaacgcagcagttatttccaaaatgctgcgcgtgatgatgctggctccgttcctcatcctgctggcggcgcgtgttaaacagctgtctggggcgaacagcggcgagaaaagcaaaatcactattccgtggtttgccatcttgttcatcgtagttgccatctttaactcgttccacctgttaccgcagagcgtggtgaacatgctggtaacgctggataccttcctgctggcaatggcgatggcggcgctgggtctgaccactcacgtcagcgcgctgaaaaaagctggggcgaaacctctgctgatggcactggtactgtttgcctggctgattgttggtggtggtgcgattaactatgtgattcaaagcgtcatcgcataaaccactacatcttgctcctgttaacccgctatcattaccgttttcctccagcgggtttaacaggagtcctcgcatgaaatacattggagcgcacgttagtgctgctggcggtctggcaaatgccgcaattcgcgccgccgaaatcgacgcaaccgcgtttgccttgttcaccaaaaaccaacgtcagtggcgtgccgcaccgctcacgacgcaaaccatcgatgaattcaaagccgcctgtgaaaaatatcactacacatcggcgcaaattcttccccacgacagttatctgattaacctcggacatccggtcactgaagctctggaaaaatcgcgcgatgcctttatagatgaaatgcagcgttgcgaacagctggggctttctttgctcaacttccaccctggcagccatctgatgcagatttcagaagaggattgccttgcgcgtattgccgaatccatcaacattgcgctggataaaactcaaggtgtgacagcggtgatagaaaacaccgccggtcagggcagtaacttagggtttaaattcgaacatctcgcggcgattatcgacggcgtggaagataaatcccgcgtcggcgtctgcattgatacctgccatgctttcgctgccgggtatgatttgcgtactccagccgaatgcgagaaaacattcgcggattttgcccgtactgtcggctttaagtatctgcgcgggatgcaccttaacgatgcgaaaagcacctttggcagccgcgttgaccgccatcatagcctcggtgaaggcaatatcggtcatgatgcgttccgctggatcatgcaggacgaccgtttcgacggcattccgctgatcctcgaaaccatcaacccggatatctgggcagaagagatcgcctggctgaaagcgcaacaaactgaaaaagcggtagcctgaagatgaataaccgggaaaaggagatccttgcaattttacggcgtaacccgctgattcagcagaacgaaattgcggacatgctgcaaatcagccgttcgcgcgttgcggcgcatattatggatttaatgcgcaaaggccggattaaaggcaaaggttacattctcaccgagcaggaatactgcgtagtggtggggacaatcaatatggatattcgcgggatggcggatatccgttacccgcaatcggcttctcatcccggtacaattcattgctcagcgggcggcgtgggacgcaacatcgcccacaatctggcgctgttaggccgtgacgtccatttgctttcagtgattggcgatgacttttatggcgaaatgctcctggaagaaacgcgccgtgccggcgtgaatgtctccggctgcgttcgtttgcatggtcaaagcacatcgacgtatctggcaattgccaatcgagacgatcaaaccgtgctggcgattaacgatacccatctgctggaacagttgacaccgcaactactgaacgggtcgcgcgatttacttcgtcatgcgggcgtggtactggctgattgcaacctgacagccgaggcgctggaatgggtctttaccctcgctgatgaaatcccggtgtttgtcgataccgtttcagaattcaaagcgggcaaaatcaaacactggctggcgcatattcacaccctgaaacccactttaccggagctggaaattttatggggacaggcgatcaccagcgatgctgaccgtaataccgcagtgaatgcattgcatcagcaaggtgttcagcaactgtttgtttatttgcccgatgagtcagtttattgcagcgaaaaggatggagaacaatttttgctgaccgcgccagcgcatacgacagtagacagttttggtgctgacgatggttttatggcgggcctggtatatagctttcttgaaggatacagtttccgcgacagcgcccgttttgcggtagcctgcgcggcaatttcgcgcgccagcggcagcttaaacaaccctaccctgtctgccgataacgcgctttcattagtgccaatggtgtaacaatgttgccggatgcgacgcttaacgcgtcttatccggcctacaaatcaggcaatttcagcaagtaaatgtaggcctgataagcttgcgcatcaggcaatgacactcaagctaaaccaataaagaacccggcaatggtcgcactcatcaagttggaaagcgtcgccgccgccagcgcccgtaaaccaagctgggcgatttccggcgcacggtgtggcgcaaccgcagaaaacgcccccaccaccaccccgatagaaccaaagttagcgaaaccgcacaacgcgaaggaaataatcgccacagttttagcatcgagagtgccagccgtttgcagatagggtgagaaattgagataagcgacaaattcatttattgccagtttctgtccaatcaaactcccggcaagattcgcatcactccagtccacacccatcacccacgccagtggagccagcaggtaacctaaaatggactccagcgaggcatgttcaaaaccaaaccagccaccaacgccgccgataataccgttaatcaacgcaattattgcaacaaatgccatcaccactgttgccacacctgcggcgattttcagcccggtcattgcccctgtcgcagcggcttcaataatgctttttggcggtgtttcggtgaaagagaggttattaaaggaaacctgcgaagattccgttgccgggcttaacaggcgggcaaacaagatcccgccagggatcgccattaatgatgccgccagcagatattccacaggcacgcccagtgcggcgtaaccaatcattgtcgaaccagcaatcgaggccatgccactacaaatcgctgtaaataattcattgcgattcagacgatcgataaagggtttgacgattgccggaatttcgttttgcccgaggaaaatggtggtgaccgcgacgaatgactcgatcttgctgatatttaatgctttctggaagataccgccgagaattcgaattaaaatccccatcacaccgatgtagtagagaatactcaccagcgcggtgacgaagataattgccggtaacaccctgaaaccaaagataaatcctgcaccatcaaataaggtatccattttcggtccgaccagagaaccgaagataaatgcgctacccgcgtcgctgtacgccatcactttatgcacgccaaaagcgactttttcagcgacccaacgccctggcggtaaccaaagcataatgccgccaatcacgacctgtaacactaacgccgcgccaacggtacgcaggctgatcttcttcttgtttactgacagtaaaaacgcaatcgtcagcaataccaccattcccagaacacttctcatgacatccatagtgattatctcttcatgtcatattgggcgacggctttctgcccatcagaaatagccaggcctgcatcttgcgataccggcccggcttgttatcaacacttaatgggttttgatgtagccgcgcacgcactcttcgactaatccccagaaccagtctgtatcaatagtgatgccgactttggtattggcgggcttgccaagaacgcccagctcgtcgcagacggtacgcccatagcaagggccactgttgacgtccacttcgacgtacatctcctgggttttaatgccatcagggttaatcagataaccgatgcaggtggcgtcgtgcaccgggccgccagcaaggccgtagttttcgaactgcgttttgagagtgaagttcatgatgtcgctgaacagctctccggcggggccgcctgccctttccatccgagcaatcacgtccggggtgcaaacggtctggttggtgagatcgaggcccatcatcactaatggaacgccggaggtgaacactacgcgtgcggcttccgggtcggcaaagatgttgaactcggcagatggcgtgaagttgcctgtaccgtaagcgccgcccattagcacaatttcacggattttgggcaggatcgcgggttgcatacgcattgccaccgcgatatttgaaagcggaccaaccggcaccagagtgatatcgccatcgcttgccatcagggtatcaatgatatatttcaccgcatgagtgctttctgcctggcgggtcagcggctcgaataccgggccatccagtccggtttcaccgtgaatattatcggcaacgatttgttgacgcataatgggctgcggcatccccgcataaaccggaacattaatctccagtttctggcaaacattcaggccattaattaatgttttatcaagcgtctgattacccgctacaatagtgatgcctaataaatctattgccggatgtttcgccgccatcattatagcaatagcatcatcatgacccggatcacaatccagaataatttttctcttttccattgtttatttcctctgtttccagttgcgttattttttctacagcaaagaaaattcgaccgggccgatgattgaatcttaacaacagcgtacgtatgctaaatatgagaaatctcatagcggataaacatcgtgaaagaaatccacaataatgatcttaagcagcaattgatgagtgaatccgcgtttaaggattgctttttaacggatgtttcagccgatacgcggctgtttcattttttagcgcgtgactacattgtgcaggaagggcaacagccgtcctggctgttttacctgacgcgaggccgcgccaggctttacgccacgctagctaatggtcgcgtgtcgctgatcgatttctttgccgccccctgttttattggcgagattgagttaatcgataaagaccatgaaccgcgtgcggtgcaggctattgaagagtgttggtgccttgcgctccctatgaaacattaccgtccgctgttattaaacgacacgctatttttacgaaaactctgcgtcaccttaagtcataaaaattatcgtaatattgtttctttaactcagaatcaatcatttccgttagtgaatcgcctggcagcatttatattactctcgcaggaaggtgatctttatcacgaaaagcatacgcaagcggcagagtatttaggcgtttcttatcgacatcttttatatgttctcgcgcagttcattcacgacggtttattaattaaaagcaagaaagggtatctcattaaaaacagaaagcagttgtcaggactggcgctggagatggacccggagaataaattctccgggatgatgcagtaaaaattattttcaatagcgcgattgccggatgcaacgcttaatacgttttatccggtctacaaatcgagcattacgccagaccaataaagaacccggcaatagtcgcactcatcaggttggaaagcgttgctgctgccagcgcccgtaaaccaagctgggcgatttccggcgcgcgttttggcgaaatagccgaaaatgcgccaacgacaacaccgatagaaccaaagttagcaaaaccacaaagcgcaaaggagataatcgcaatggttttcacttccagcgtgccgcccgtttgcaggtatggggagaaactcaggtaagcgacgaattcgttaatcgccagtttctgcccaatcaggctacccgcaagattggcatcactccagtccacacccatgatccacgccagcggtgccagcacatagccaaaaatactttccagagaggcattggcgaaaccaaaccagccgccaattccgccgataatgccgttgatcagcgcaataattgcgacaaacgccattaccaccgtcgccacaccagcggcgatttttagcccggtcatcgcaccgctcgccgccgcttcgataaagctttttggcggcgtttcgctgaacgacagattttcaaatgtgacctgcgaaggctcggttgccgggctaagaatacgtgcaaacaaaatcccgccagggatcgccatcagcgatgccgctaacaggtagtcaattggtacgcccattccggcataaccaatcatcatcgaaccagcaatggacgccatcccgctacaaattgcggtaaacaactcgttgcgattcatgcgatcgataaacggtttaacgatcgccgggatctcattttgcccgaggaaaatagtagtaaccgcaacaaaagattcgattttgctgatgttgagggctttctggaaaatgctgccaaggatgcgaatcagcagccccatcacgccaatgtagtacagcagactgatgagcgcagtaacgaaaataatcgccggaagtacgcgaaaggcgaagataaaacccgcaccgtcaaacaggacatccattttcggcccaaccagcgaaccaaaaatgaaggcgctaccggcatcactgtaagacatcactttatgaacgcctaatgccgcctgttctactgcccattttcccggtgggaagtagagcatgatgccaccaatagcgatttgcagcagcagtgcggctccaaccgtgcgcaaactgatgctctttttattcactgacaacagaaatgctattgccagtaacaccaccatccccacaacacttctcattatatccataatgattttcccttcatgccggtaaacccggcgtcagcgccaggttttggtatgcttgatgagtacgggcgacggctttctgcccgtcagaaattaacccgcgagacgctgatattctttggcaatttcgctcgccagaatggcgttgttgaacaccagctggatgttggatttcaggctgtcaccgccggtcagttcagcaacgcgcgccagcaggaatggcgtactttctttaccaatgactccctgagcttcagcttcagctaccgcctgatcgatcgccgcattgatagtgtgttccggcatagcaaactgttccgggatcgggttcgctaccacgaggccaccgttcagaccgctttgccatttcaccaccattgcacgggcaatttcgctggcgctgtcgagacgaatgctgacgtcaaacgggctggtgcggcagaaaaacgcaggcagcgctttagtctgatagccaattaacggcacaccgaaggtttctaaatactcagtggttaatcctaaatcgagaatagatttcgccccggcacaaacaacggtgacattagtatttgccagttcttgcaaatcggcagaaatatcgaaggtatgttccgccccgcgatgcacaccaccaattcccccggtggcaaatactttaattccggcaagcgccgcaataatcatcgttgaagccacagtggttgcgccattttttccggcggcaacaacaaaaggtaaatcgcgacgactaactttggtcacgttatgcccttcacgacccagtaattcaatttcttctttgcttaaccccactttcatcacgccgccaataatggcgatcgtggcaggtacagcgccctgtttacgaatagtttcttcaacttcaattgcggtctgggcattttgtgggaacggcatcccgtgagaaataatggtcgattccagcgccacaaccggttttttgttttttaaagcgtcctgcacttccggggaaatttgtaataattcaggggaaatttttaattcagacattctgcgttctccactaacgatataacgttggcaatcgataaatcggggttattggtgtattcacaggagagcgccattgacgaacatccctgtgcgaaacgaacagattcggcaaacggcattccgtctacccaacacgaagcaagtcccgccatcatggcatcgcccgctccggtaacattaataacattggttttgatcggcgcagaccagccactttcaccgctgatatcgctgtaataaacgccgtcgccgcccatgctcaataccagtcggttcaggccatgttgatggaaccaggcagcaacttttgccacatcttcacgccctgacagcgcaatcccactcagggtttccgcttcaaggcggtttggcttgagagtgtggatctgatttagacggtcgcgcactttgacacatttccatgccgaaaccggatcgacaaatacgggtacgttggcggcattatccagaatccatgccagtgcctcttcactgatattacagtccgcgacaatgacctttgccctctgaataaattcaccgtgctgtgcgagatattcagctgtaatagcgttgctaatattcatgtcatttatagcaaccagcatttcaccggtattatcgagtaatgataaataactcgacgtattttctcccggcacaatcaggcatttatcgacataaacgccagattgattggtttgcgttagcagcgattgaccataaaaatcactgcctacggcgctcagtagccaggctttgttacccagcaacgccaggttttgtgcaatattgcgccctactccaccaggcgtaaattttattttacctggatttgaatccgcataatttaatgattcatgtgaatatccggcgacatcaatattcgccgaacctataattacgacataatccttttcgcgcatagcacgtcctctggtaaaaaattaccaaccctgtcaatccacaagaatatagatactgcaaagacggtttaaacatgtgttcatatttaaacatgtgctcatagtatgcatgttttacgtaaagtaaattaccgccagagaggcaaaatgggcagatttgagcaggctcacaaaatgcgattaaatgcctgaattacaaaagcgaggaatttgtgacgggatgcacagaacagaacaataaaaaagggcagaaaataatctgcccttgaggaaataacctgagtgtttgatgaacgtttgaagtttctactgaaagataaaaccatttaaattcataaaattacattcacaaaccggtcattctctttgcgctcatcaaatgttacaggacaggaaatttctgccctgtaacacaccttttattacgctgctttcgctactgcgtccacttccggacgtttcaggaaggcataggccaaacccgccaccagcgtaccggcaataattgctaccaggtaacccaataccggcgtaatagcgccagggatcagcagaacaaacagaccaccgtgcggtgccatcagtttcgcaccaatcgccattgagattgcgccagtcagcgccccacccacgatacagcacggcagcacacgcatcggatcacgagcagcaaacggaattgcaccttccgaaatgaagcacagtcccaataccagagcggctttgccaccttcctgctgcgctttgtcgaatttgcgacgcgccaccattgttgccagacccattgccagcggtggcaccatacctgccgccataatcgccgccatcgggccataggtttgagtactcagcagacccacaccgaatgcgtacgctgctttgtttaccggaccgcccatgtcagtacacatcatgccaccgaggatcgcccccagcagaaccgcattcgcagtccccatggtctgcagccagtgagtcagcccttcgagaatgccagcaactggtttaccgatcaggtagatcatcgccagaccgaccaccagactggaaattagcggaatgatcaggatcggtttcagcgcctccatactctgtggcagtttcaattgcgtactgattaacttcgcaatgtaaccagccaggaagcccgcaataataccaccaatgaagccagaaccggtgctgaccgccagcataccgccaatcagacccggagtgaggcccggacgatcggcaatggaaaaggcaatataacctgccagtaccggcaccatcagcgcaaaggctgaaccaccaccaatctgcatcagcgccgcagccaacgtacccggctctttaaacgcttcgataccaaaagcaaaagaaagcgcgatacacagaccacctgcaacgaccatcggcagcatgtaagaaacgcccgtcagcaagtgacggtatgcgcctgcactctctttcttactttcagtggtcgccgtttgagctttgcccgccggttcatacggcgttgcttcagcaaccgctttatccagttcctgcgcggttttcttcagcgccagaccggtagaggtacgatacatcggtttaccagcaaatttcgccagatccacttcgatatctgccgccacaatcaccagatccgctgctgcgacttcttcgggagtgattgcattacccgcgccaacagaaccacgggtttcaactttcacccaccagccacgttttttcgcttcggtttcaatggcttcagccgccataaaggtgtgtgctacgccagtcgggcaagcagtcaccgcaactacgcgtttcggaccgctggcggcaactggtgctgtcgcagcgaccggcgcagtgtaaggtttcgcatggcctttggcttcactcaggaacagctcagggtgcgcaactgcccgggaaatatcgcccagccagacatttttaccgttcagcgcgctgtcgttcgggatggaatcaccgagaacaatcgccatttcagcgtcgttcggattgtcgatgatttccagttttgcttttcgcgccgccgcgcccagcagggtcttcgccatataggcgcgtgcctgaccgagattagcgtcaataatcagcagcgttttcattatgcctctcctgctgtcagttaaaaggttgtaagtcgacgcgcgccatcattgcggccaactgcggacgatcggtaatacccacattgctttgacttaccgccagggctgcaacagctgtcgccagacgcagtgtgtgttcactggattcacgcatcagcaagccataaatcaggccaccaaccatagaatcccctgcgccaacggtgcttacgacatcgactgacggtggtttggcgatccattcgccggaggcattaacccaaagcgcgccttcggcacccagtgaaataacaacatgcgcgatgccttgttcacgtagcgcatgtgcagcttcaatcacatctttcatttcaggcagtttacggcctgcccagatttccagctcgcggcggttaggtttcaccagccacggtgccgctttcaaacctgctactaacgcttcacggctactatcaaagataatgcaaggacactgactacgcaggcgagtcatccagtcggtgaacgcttccgggctgacgcctgacggtaagcttccgctgacacagaccatatcgaactgaccgagccagctcagagaatcagtcacaaagcgttcccagtcggcgggggtgacttcaaaacccgagaagttgaagtcggtcacttcgccgtctttttccgtcagcttaacgttaattcgggtgcgcccctgtacaacctggaaacggttggcaatgcccagctcgctgaacagttgctgaaaaccatcctgattgtctttacccaggaagccgccaacggtgacatcaattcccaggtcttttaatactttggccacgttgatgcctttacccgccgcatgcagaccggtggttttcaccaggttcacttcgccgcgttcaatttccgggcagaaaccaacaaggtcataagccggattaagggtgatagtagcaacacgtctgctcattatgcgccctccccaagaccagcagcgatagcgtcgccgattgctttcagcgcctgttcagcatctgcaccctgggcggtaaagcgtaggcgatgacctttcttaacgccaagtgccacaactttcatcagactacgtccgtttgccggtttgccggtaccatcaaggtttgtcacggtaatatcactgttaaattgtttaatggtattgaccagcatggtacctggacgagcatgcaggccgtgttcattgcgcaccacaaactccgcgcttaacacgtcgtcggtcggcgcatcatcgctggtcagcagcgccagcaacgttgccgcatccgctttcagcaagcggtcagctttattgtcgagcaataaatcagcgagacgcttaagaaccgcgatgggctgatcgtcattcatcgccacactcaccagcatggctgccgtttcgccgtccacatcaaaagcatttgccgcacggcttaccgcaatcgcgctacgcagattgccttcggcgctatcgctcagccagataccctgtccgagattcagcggttgttcattgatggctttggtgacgaaagtggcgtcaactgcccccgcctctttcagacgcgcagcgttcagcgcctgaagagtcagcagatcgctggcgacgatatccagtgtcagcatttcgttgtcgagcttcagctgctcactctgcttttcgcccatcagtaatgcgcgaagttcttctgctgttgttgctgacttcagttgttcagcaacggaatcatcgctcagtacgtgggtcagctggcgtagcaggcccagatgttcatccgagctggcagcaataccgattgccacgtacgctacctgaccgtcaccccaggtgacgccttccgggaactgaaatacctgaacgccggttttcagcacctgatcgcgggtgtcggtagtgccgtgtggaatagcaataccattgccgaggaacgttgaggtttgctgttcgcgcgccagcatgccattgacgtagccttctgctacattaccggcctgcaccagcgccgcagcgacctggcgaatcgcctcttctttgtctccggccttttcgcccggatggatgtcctgtacggataactggaacatagttctcctctcttgctgaattgaaacgattcagcctctatgagaaaaaaagcgccaacctggcttagggttaaagacaagatcgcgctgaaacgtttcaagaaagcataatacttctgtttcagcacgcaaggaaagccgtaaagttatgagcaaaagtttgatgtgctgcacaattttttgccatttttcctaattgctgatgggaaaatccgttatcagcaatttcatttcagcagcgtcagcagccaatcagcaacagtgaaatggcattttgactattcgtggcgcttttgatttcgctgtctgtttattttctgacaagcagcgtaaactccgcgtcttcctcttccagtgatcgaccagcatgcataactcccccgcagtctccagcgcgaaatcgtttgacctgacctcgacggcgtttttaatcgttgcctttctcaccggtattgcgggcgctctgcaaaccccgacactcagtatttttcttaccgatgaagtacatgcccgtccggcgatggtgggattcttctttaccggcagcgctgtcattgggattctggtaagtcagtttctcgccgggcgctctgataagcgcggcgatcgcaaatcgctgattgtcttttgctgcctgttaggcgtgctggcctgcaccctttttgcctggaatcgcaactactttgttttgctattcgttggcgtctttcttagcagctttggctcgaccgctaacccgcaaatgtttgcccttgcccgtgaacatgccgacaaaaccggacgtgaggcggtgatgttcagctcttttttacgcgctcaggtttcactggcatgggtcattggcccaccgctggcttatgccttagcgatgggtttcagctttacggtaatgtatctgagcgcagcggtagcgtttattgtttgcggtgtgatggtgtggctgtttttaccgtcgatgcgaaaagagcttccgctggcgaccggcacgatcgaagcgccgcgccgtaaccgtcgcgatacgctgctgctgtttgtcatttgtacattgatgtggggctcgaacagcctgtacatcatcaacatgccgctatttattatcaacgaactgcatcttcccgagaaactggccggtgtgatgatggggaccgccgccgggctggaaatcccgacgatgttgattgccggatatttcgccaaacgtctgggtaagcgtttcttaatgcgcgttgctgccgtgggtggcgtctgtttttacgcaggaatgctgatggcgcattcacctgtcattctgttgggcttgcagctgctaaatgctatttttattggcattctgggcggcatcgggatgctctattttcaggatctgatgcccggtcaggcgggttcagccaccacgctctataccaacacttcgcgcgtgggctggatcatcgcaggatcagtggcgggcatcgtcgccgagatctggaattatcacgctgtgttctggtttgcgatggtgatgattatcgccactctgttttgcttactgcggattaaagatgtttaaggcgcggtcagcatttccagatcgataagccaggtcatggcctgctgacgcgagttaccgcacatttcagcgctggcttgtaagcctgcacagactttcggtcgcagtggcgaggtgaaaattttacagcgttgctgttcatcaagctgaatgcagggcgtattggcgggcttgccatctggcataccgggaatagggctggaaattgaaggggcagtgcaacacgccccgcaacccggacggcattccatacgttgttctcttaaggttaaccaccggattgatgagcgcgcacagtaccaccttttttgcaccagcaaaagtgcgaataccacttgcccgaaaggcccgtcgcgagtactttgtcgcgatatttttgacattttcgactacaggaatttttcgatgccaagagcgaacgaaattaaaaaaggtatggtactgaattacaacggcaaactgctgctggttaaggatattgatattcagtcgcccactgcccgcggtgccgctacgctgtacaaaatgcgtttttctgatgtccgtaccgggctgaaagtagaagagcgtttcaaaggtgatgatatcgttgacaccgtgacgctgacccgccgttacgttgacttctcctatgtcgatggcaacgaatatgtctttatggataaagaagactataccccgtataccttcaccaaagatcagattgaagaagagttgctgtttatgccagagggcggcatgccggacatgcaggtgctgacctgggacggtcaactgctggcgcttgagctgccgcagaccgttgatctggaaatcgttgaaaccgcaccaggcatcaaaggggcatctgccagcgcccgtaacaaaccggcgacattgagcactggtctggtgattcaggtaccagaatacttaagcccgggcgaaaaaattcgtatccatatcgaagaacgccgttatatggggcgtgctgactaacttcagccgcatgcagaaaagggatagctcaggctgtcccttttttaatttattataccaatcttctattttgcgcttcctgaacaccttacgccctcaattttcactcgttgattgatcgccctcacacttcatcgcattaacaatccagaccaatttcaattgctgtcatataactttacactgtcgttgttaattaatcgttactaagacgtgactcctatgaatacaatcgcctccgttacgctcccgcatcatgtacacgctccacgctatgatcgccagcagttgcaatcacgtatcgttcattttggctttggagcctttcaccgcgctcatcaggcgttactgaccgatcgtgtgctgaatgcccagggcggcgactgggggatctgtgaaatcagcttgttcagcggtgatcaactgatgagccagctccgcgcacagaaccatttatataccgtgctggagaaaggtgcggacggcaatcaggtgataattgtcggtgccgttcacgaatgccttaatgcaaaactggattccttagcggcaattattgagaaattttgcgagccacaggtggcaattgtttccctgacgattaccgaaaaaggctattgtattgacccggccaccggtgcactcgacaccagtaatccgcggattattcacgatctacaaacccctgaagaacctcactccgcaccgggtattctcgtcgaagcactgaaacgccgccgtgagcgcggccttacaccgtttaccgtgctctcctgcgacaatattcccgacaatggtcatgtggtgaaaaacgcggtgctgggaatggcagaaaaacgttcgccagaactcgccgggtggataaaagagcacgtcagttttccgggaaccatggtcgaccgcattgttccggctgcaaccgacgaatcactggtggaaatcagccagcatctgggggtgaatgatccctgcgcgattagctgcgaaccgtttatccagtgggtggtggaagataacttcgtcgctgggcgtcctgcctgggaagtcgcaggtgtacaaatggtgaatgatgtcctgccatgggaagagatgaaactgcggatgcttaatggcagccactcttttctcgcttatctgggttacctctcaggattcgcccatatcagtgattgcatgcaggatcgcgcatttcgccatgccgccagaacattaatgctggatgagcaagcgccgacactgcaaattaaagatgtcgatttaacacaatatgcggataagttaattgcacgttttgctaatccggcgctgaaacataagacctggcaaatcgcgatggatggcagccagaaattaccgcaacgcatgctggcaggtattcgcatacatcaggggcgcgaaacggactggtcgttgctggcattaggcgttgcaggctggatgcgttacgtcagcggcgttgatgatgccggaaatgccattgatgttcgcgatccgcttagcgataaaattcgcgaacttgttgcgggcagcagcagtgaacaacgcgtaaccgccctgctttccctgcgtgaagttttcggtgatgatctgccagataacccgcattttgtgcaggccatcgaacaagcctggcaacaaatcgtacaattcggcgcacatcaggcgctattaaacaccctcaaaatttaacgatttctgcggttaaagcggatgaagctcaccttcgtccgctctccccttctcttttctgccttttttagccaggattaacgctcagttaacttaccagagtattgcggagccgttgtgaccaggaccaacctcatcaccggttttctcggcagcgggaaaaccacgtcgattcttcatctgttagcccataaagatcccaacgaaaaatgggcggtactggttaatgaatttggggaagtcggaattgatggtgctttgctcgccgatagcggcgcattgctgaaagagatccccggcggctgcatgtgctgcgttaatggtttacccatgcaggtagggttgaataccttactgcgtcagggaaaaccagaccgcttgttgatagagccgaccgggctgggccatccgaaacagatcctcgatctgttaaccgcaccagtctatgaaccgtggatagatctgcgcgccaccttgtgcattctcgatccgcgcttgctgctggacgaaaaaagcgccagcaatgaaaacttccgtgaccagctggctgccgcagacatcattgtcgccaataaatccgaccgtacgacgcccgaaagtgagcaagcgctacagcgttggtggcagcaaaatggtggcgatcgacaattaattcacagtgagcatgggaaagttgacggtcatcttctggatttgccgcgtcgcaatttagccgagttgcccgccagcgccgcgcattctcatcagcatgtcgtgaaaaaagggttagcagcgttaagcctgccagagcatcaacgctggcgtcgcagtctgaacagcgggcaaggatatcaggcctgcggctggatattcgacgctgatacggtattcgacaccattggcattctggaatgggcgcgacttgcaccggtggaacgcgtcaaaggcgtgctgcgtattcccgaagggctggtgcgaatcaaccgtcagggcgatgacctgcacattgaaacgcaaaacgttgcgccaccggacagccgtattgagctgatttccagcagcgaagctgactggaatgccttgcagagcgcgctgttgaagcttcgtttagcgactaccgcgtaaggttgcctgcgtttttcagtaagataattagagaaaatatgattaaaaatttgccgcaaatagtgttgttgaatattgtcggcctcgcgctgtttctttcctggtatatccccgttaatcatggattctggttgccgattgatgcggatattttttatttctttaatcagaaactggtcgaaagtaaggcctttttgtggctggttgcattgaccaacaatcgcgccttcgacggttgttcactgctggcgatgggtatgttgatgctgagtttctggctgaaagaaaacgcccctggcagacgacgtatcgtgattattggtctggtcatgctattaactgcagtggtattaaaccagctgggtcaggcattaattcctgtaaaacgggccagcccaacattgacttttaccgatattaaccgcgtcagcgaactgctctctgttcccacgaaagatgcctcacgagatagctttcccggcgatcacggcatgatgctgcttattttttcggcattcatgtggcgttatttcggcaaagttgcaggccttatcgcccttattatttttgtggtttttgcatttcccagagtaatgattggcgcacactggtttactgacatcattgtcggttcgatgaccgtgatattgatcggtttgccctgggtgttgctgacgccattaagtgatcgattaatcaccttttttgacaaatcactaccaggaaaaaacaaacatttccaaaacaaataactcacagtaattaacatcatcagggttatttttatagtgaggataatcctgatgatgcgcaccgtgctttcatctatcgaacgcaaaaatcattctctaagtaaatgaatggattgcatgcgtttcactcaattgtactttaattgaccaaccccgcttattaactttctgtatcactttttcttataaaaaatcatgtaaaaccgctcgccaagaccgcaccaatcgggtaatctcgaactcgttttgcctcggcggtagattatcctcacagcatataattttgtgcgttagtccacagatttggccttaaggaattgtttcaacatgcccaggtaattagtctcgtgtcgcttggcatttttttataacgatatttgtcgttaaggacttcaagggaaaacaaacaacatggtcaaatctcaaccgattttgagatatatcttgcgcgggattcccgcgattgcagtagcggttctgctttctgcatgtagtgcaaataacaccgcaaagaatatgcatcctgagacacgtgcagtgggtagtgaaacatcatcactgcaagcttctcaggatgaatttgaaaacctggttcgtaatgtcgacgtaaaatcgcgaattatggatcagtatgctgactggaaaggcgtacgttatcgtctgggcggcagcactaaaaaaggtatcgattgttctggtttcgtacagcgtacattccgtgagcaatttggcttagaacttccgcgttcgacttacgaacagcaggaaatgggtaaatctgtttcccgcagtaatttgcgtacgggtgatttagttctgttccgtgccggttcaacgggacgccatgtcggtatttatatcggcaacaatcagtttgtccatgcttccaccagcagtggtgttattatttccagcatgaatgaaccgtactggaagaagcgttacaacgaagcacgccgggttctcagccgcagctaataaaccgtttggatgcaatcccttggctatcctgacgagttaactgaaagcactgcttaggcagtgcttttttgttttcattcatcagagaaaatgatgtttccgcgtcttgatccaggctatagtccggtcattgttatcttttaaatgttgtcgtaatttcaggaaattaacggaatcatgttcatacgcgctcccaattttggacgtaagctcctgcttacctgcattgttgcaggcgtaatgattgcgatactggtgagttgccttcagtttttagtggcctggcataagcacgaagtcaaatacgacacactgattaccgacgtacaaaagtatctcgatacctattttgccgacctgaaatccactactgaccggctccagccgctgaccttagatacctgccagcaagctaaccccgaactgaccgcccgcgcagcgtttagcatgaatgtccgaacgtttgtgctggtgaaagataaaaaaacattctgttcatctgcgaccggtgagatggacattccactcaatgaattgattccggcgctcgacattaataaaaacgtcgatatggcgatcttacccggcacgccgatggtgccgaacaaacccgcaatcgtcatctggtatcgcaaccctttgctgaaaaatagcggcgtctttgccgctctgaatctcaacctgacgccttcactcttttatagttcacggcaggaagattacgatggcgtcgccctcattattggcaatactgcgctatctaccttttcttcacgtttgatgaacgttaacgaattaaccgacatgccagtccgtgaaactaaaattgcgggcattcctctgaccgttcggctttatgcagatgactggacatggaacgatgtgtggtacgcatttttactgggcggcatgagtggaactgtcgttggcctgctctgctattacctgatgagcgtacgtatgcgccccggcagagaaatcatgaccgccatcaagcgcgaacaattttacgtggcgtatcaaccggtggtggatacacaagctttgcgagtaacgggcctggaagtactgctacgctggcggcatcctgtcgcgggagaaattcccccggatgccttcattaactttgccgaatcgcaaaagatgattgtgccgctgactcagcacctgtttgagttaattgcccgcgatgccgcagaattagaaaaagtgctgccggtaggcgtcaaatttggtattaacattgcgccggaccatctgcacagcgaaagctttaaagcagatatccagaaactgctcacttccctgcccgcacaccatttccagattgtgctggaaattaccgagcgcgatatgttgaaagagcaagaagccacacaactcttcgcctggctgcactcggtcggcgtagaaattgctattgatgacttcggcaccgggcacagcgcgcttatctatcttgagcgttttacgctcgattatctgaaaattgaccgtggatttatcaacgccatcggtacggaaacgatcacttcccccgtacttgacgcggtgctgacgctggcgaaacgcctcaatatgctgacggttgctgaaggggtcgaaacgccggaacaggcgcgatggctaagcgaacgcggcgttaatttcatgcaaggctactggattagccgcccgttaccgctggacgattttgttcgctggctaaagaaaccgtatacgccgcagtggtaaggtgtgcttacgtcccttattattcatagtgaaagcatgccggattgcggctaatgatgagtaaaaggaaatccgttgcagatgattgtgcgcatactgctgctgtttatcgctctgttcacctttggtgtgcaggcgcaggctatcaaggaaagctatgcctttgccgtgctgggcgaaccccggtacgcgtttaatttcaaccattttgattatgtgaaccccgccgcgccaaaaggtgggcagataacgttgtcagccctcggcaccttcgataatttcaaccgctatgcactgcgcggcaacccgggcgcacgcaccgagcagctgtacgacacgctatttacgacttccgatgacgaaccaggcagttattacccgctgattgctgaaagcgcacgctatgctgacgattattcctgggtggaggtcgctattaatccgcgcgcccgttttcatgatggttcgcccattactgcccgcgatgtagagtttacttttcaaaaatttatgaccgaaggcgtgccgcaatttcgtctggtctacaaaggcaccaccgtcaaagccattgcaccgttaaccgtgcgcattgagttagctaaacccggcaaagaagatatgctgagtctgttttcgctgccggtatttccagaaaagtactggaaggatcacaaacttagcgacccgctcgccacgcctccgcttgccagtggtccgtaccgcgttacgtcctggaaaatggggcaaaatattgtctattcccgtgtgaaagattactgggcagcaaacttaccggtaaaccgtggacgctggaatttcgacaccattcgctacgattattacctcgatgataatgtcgcctttgaagcgtttaaagcaggtgcctttgatttgcgtatggaaaacgacgccaaaaactgggccacgcgttataccggtaaaaatttcgataaaaaatacatcatcaaagatgagcaaaagaacgaatcagcccaggatacgcgttggctggcgtttaatatccaacgtccggtattcagcgatcgccgggtccgggaagctatcactctcgcctttgactttgaatggatgaacaaggcgttgttttacaatgcctggagtcgcacgaacagttattttcagaataccgaatacgcggccagaaattaccccgacgccgcggagctggtgcttctggcaccaatgaaaaaagatctaccgtcagaagtcttcacacaaatctaccagccgccggtatccaaaggcgatggctacgatcgtgacaacctgttaaaagccgacaaacttctcaacgaagcgggctgggtgctgaagggtcagcaacgcgttaatgccacaacgggtcagccactcagctttgaattattgcttcccgcaagcagcaatagtcagtgggtattgccgttccagcacagcctgcaacggctgggtatcaacatggacattcgcaaggtggataactcgcaaatcactaaccgcatgcgcagtcgcgactatgacatgatgccgcgcgtatggcgggcgatgccgtggcccagttccgatttacagatttcctggtcatcggaatatatcaattccacttataatgcccccggcgtgcaaagcccggttatcgactcgctgatcaaccaaattattgccgcgcagggaaataaagaaaaattactgccgttggggcgagcactggatcgcgtattaacgtggaattattacatgctgccaatgtggtacatggcggaagaccgtctcgcctggtgggataaattctcccagccggccgtgcgccccatctatagcctcggtatcgatacctggtggtatgacgtcaataaagcggccaaactgccgtccgccagcaaacagggagagtagatgggcgcttacctgattcgccgtctgttgctggtgatcccaacattatgggcgattatcaccatcaactttttcatcgtgcaaattgcgcctggcggtccggtcgaccaggccatcgccgccattgagtttggtaatgccggagtattacccggcgcaggcggtgaaggtgttcgtgccagccatgcgcaaacgggtgtcggcaatatcagcgacagtaattaccgtggcggacgcggattagatccagaagtgatcgctgagatcactcatcgctacggttttgataagccgatccacgaacgttacttcaaaatgctctgggactacatccgctttgattttggcgatagcctgtttcgcagcgcctcggtgctgacgctgattaaagacagtctgccggtttccatcaccctcggattgtggagcacgctgattatctatctggtgtcgattccgttaggcattcgcaaagctgtttataatgggagccgctttgacgtctggagtagcgcatttatcatcatcggctacgccattccggcctttttgtttgccatcctgctgattgtcttcttcgcgggcggcagctatttcgacctgttccctctacgcggcctggtttccgctaactttgattcgctgccgtggtatcagaaaatcaccgattatctgtggcatatcacgctgccggtgctggcgacagtgattggtggctttgcggcgctgaccatgctgacaaaaaactcattccttgatgaagtgcgcaagcaatacgtggtgaccgcgcgtgcgaaaggggtaagtgaaaaaaatattctctggaaacatgtgttccgcaacgccatgctgctggtgattgccggttttccggcgacgtttatcagcatgttttttaccggctcgctgctgattgaggtgatgttttcactcaatggtctgggcttactgggctacgaagcgaccgtctcgcgcgattatcctgtaatgtttggtaccttgtatattttcaccctgattggcctgctgctgaatattgtcagtgatatcagctatacgctggttgatccgcgtattgattttgagggacgttaatgtcgcgactcagccccgtcaatcaggcccgttgggcgcgttttcgtcataaccgtcgcggctactggtcgttatggattttcctcgtcttgtttggtttgagtttgtgttctgaacttatcgccaacgataaaccgttgctggtgcgttatgacggcagttggtatttcccgttattgaaaaactacagcgaaagcgattttggcggcccgctggcaagtcaggctgattatcaggacccgtggctgaaacaacggctggaaaataacggctgggtactgtgggcaccgattcgctttggtgctaccagtatcaactttgctaccaataagcccttcccttctccaccctcccggcaaaactggctgggaacggatgccaacggcggcgatgtgctggcacgcattctctatggcacgcggatctcggttctgtttggcctgatgctgactctctgttccagcgtgatgggcgtgctggcgggggcgctacaaggctattacggcggtaaagtcgatctctggggacaacgctttattgaagtatggtcggggatgccgacgctgtttttgattattttactttccagcgtcgtacagcctaacttctggtggctgctggcaattactgtcttgtttggctggatgagtctggtcggcgtggtgcgggcggagtttttacgtactcgtaatttcgactacattcgtgcggcacaggcgcttggcgtcagcgatcgcagtatcatcctgcgtcatatgttgcctaatgccatggtcgcgaccctcacctttttaccgtttattttatgtagttcgataaccaccctgacctcgctcgatttcctcggcttcggtctaccgctcggttcaccgtcactcggtgaactgctgttacaagggaaaaataaccttcaggccccgtggcttgggatcaccgccttcttgtcggtggcgatattattgtctttgctgatctttattggtgaagccgtccgcgacgcatttgatcctaataaggcggtgtagcatgacgcaaactctgttagcgattgaaaatttgtcggtgggttttcgccatcagcaaaccgtacgtacagtagtcaatgatgtttcactacagattgaggctggcgaaacgctggcgctggtgggtgagtcaggttcaggcaaaagcgttaccgcgctgtcaattttacgcctgctcccttccccgccggttgaatatctctccggcgatattcgttttcatggcgaatcgctgcttcacgccagcgatcaaacgttgcgcggtgtacgcggtaataagatcgccatgatttttcaggaaccgatggtgtcgttaaatccattgcataccctggaaaaacagctttatgaagtgctttcactccaccgcgggatgcgtcgggaagcggctcgtggcgaaattcttaactgccttgatcgcgttggtatccgccaggcggcaaaacggctgacagattatccgcatcagctctccggcggcgaacggcagcgggtgatgattgcgatggcgctgttaacgcgaccggaattattaattgccgatgaaccgaccaccgcactggacgtctctgtccaggcgcagattttacagctgttgcgcgaactgcaaggcgagctgaatatgggcatgctgtttattactcataacctcagcattgtcagaaaactggcccaccgcgtggcggtaatgcaaaacggtcgctgtgtcgagcaaaattacgccgctacgctatttgcatcacccactcatccttacacacaaaagctactcaacagtgaaccgtcaggcgatccagtgccgttgccagaacctgcctcaacgttgctggatgttgaacagcttcaggttgccttccccattcgcaaagggattttgaagcgcattgtggatcataatgtggtggtgaaaaacatcagttttacgctacgagcgggtgaaacactgggtttagtgggcgagtccggttccgggaaaagtacgacgggactggcgctgctgcgactgattaattctcagggcagcatcatctttgacggtcagccactgcaaaatttaaatcgccgccagctgttacctattcgtcatcgcattcaggtggtatttcaggatccaaactcctcgctcaacccacgactcaacgttttgcagattattgaggaaggcttacgggttcaccagccgacgctttctgccgcacaacgcgaacaacaagtgatagccgtgatgcatgaagtgggattagatcctgaaacacgccaccgttatccggcggagttctctggtggtcagcgacaacgtattgcgattgccagggcattaattcttaagccctcgctgatcatacttgatgaaccgacatcatcactcgacaaaacggtacaggcgcaaatattgacgctattgaaatcattgcaacaaaagcatcaactggcctatttgtttatcagccacgatttgcacgttgtccgcgcgttatgtcatcaggttatcatactgcgacaaggggaagtagtggaacaaggaccgtgcgcgcgcgtgtttgccacaccgcagcaggagtatacgcgtcagctactggcgttgagctgacgcttaaaaaggattgtagtttgaaaagggttcggcaattgccacaccaaaatttttcaatcggcatgttgcagcaaactcgtcctggcgatttacaaacaggcacggctcaccttcacactccagcaccgaacatggaacttcgatgtcgcttaacgcctggcttagtttatacatcaccgaccatgcattatcaccatccgggctaagcaatttaagcgccaccaggctgttgtcaccgcacggtccattttgcggaatcggttcaaccttcgaacctgcgaaaccagcagaccagcgatagttctgcggcagtcgatggacgattgagagttgtaatgaagtcacttattttccccggaagcacattcacttcacaatttgtttacatcaattttaacacatcatcaacaatccgtctttatacagatcgtaaagattgatgcctcgcctgcgtggcctctatggctctgatttaagtaatatctgcgggcgtggtcacgtttgcggggctatatgtacccgtttctgcgatctaactcaacctttttaactacaatgatgtgactttttacataaattgattttacataaaataaacatatatcgggggaatgatagatttgtggttgacatgcatcaacaaaggaagccttttagcttcctcgttgtgcaatagatcaccgttttttcggccgactggcgtacagacagaagagaatggagctggttgcgcagaatgcaattgaccaaatcatcggccatgcagagttaaaggtcgcaagagaaagcaatgcgccaacaattgcccctatgccaaaacggaaggttcctgccagcgaagatgccgttcccgccatatggggaaactcatcaagaatgaccgccatcgcattggatgacaccatcgacacgcagcccacaaacgccgcaacgccaaccaccagcgaccaaaatcccagccccagcagcgcactgatgaccatccacgctgccataataaattgtatccacaaccccgagcggaacatatttaacgcgccaatgcggcggacgaagcggctgttaaagatggtcatcacgaacagaaaaacaatgtttagcgcaaagtaataaccaaagttttccggcgcgacgtggttaatttcaatataaacaaacggtccggcgcttaagaatgagaacatcccggcaaagctgaaaccactggcaagcatgtagctcaggacacgtttatggcggaacagcgccgcaaagttaccaatagtggtacgaatgtgaaatggctgacgacgctccggtggtaaggtttctttaatcaggaagaaaatcattgccgaagccagaatcgccgctaatgccaggatccagaagatgtaatgccagctcagccacaccagcacccagccgccaactatcggtgccatcagcggtgcaatggttgtcaccagcatgacaaacgacatcatccgcgagaactcttctttcgggtaaatatcgcgcatcagggcgttaatgaccacgctggccgcagccgcagccagcccgtggaagaaacgcatcacaatcagctgatcgatggtgtttgccaacgcacacgccaccgcggcggcggcaaacaccagcgtaccgccgagcaccaccggcttacgcccgaagctgtctgccatcggcccgtagattaactgccccaacgcaaagcccagaatataagtactgagggtcatctgcgtactgcccgccggtacgccaaactgcgctgaaattaccggtagcgcgggcagatacatatcaatcgacagcggcatcaacatggccagcaggccaaggataaaaacaatagcaaacgacgaatgctgtcgggtggtcacaacgggctcctgaaagtcattgaaaagttagacgacgctggcaatttcttcttcagttaacggacgatattcaccgggggctaaatcagcatccagcgtaataccgccaatacgttcacgatgcagctcaaccacgtggttacccacggcggcgaacatgcgtttcacctgatgataacgcccttcgctgatggtcagacgaacctgcgttggggtaatcacttccagcaccgcaggcttagtgagatctttttcgttatgcagctgcacgcctttagcaaattgctctgccgtatcgtcagctacaggtgattccagtgtcaccagataggtcttctcgcaatgatggcgcggagaagtaatgcggtgcgaccactgaccatcatcagtcatcagcaccagaccggtggtatcaatatccaaccgccccgccgcatgcagtttccacgctaccggttcatcaagaaaatagagcaccgttgggtgatcagggtcgtccgtggagcaaacatagccctgaggcttattgagcatgaagtaacgtggaccgtgttgctgcgccagcgggttgccatcgtaagcgacatcatgttcaggaagcagtttgaacgctgcattacggacgatttcgccatcgacggtgacacgattgccgcggatttcacgcccggcaatagcacggctaacgccgagttgctgtgcgataaatttatcaagtcgcatgtgtgtgattttgcctgtaaaaacggaggtcgggcattgacccgaaaatctgaactgttgtctgcccagtatagcggtctaataacatccctcaagggaaaaagatccatggcatactattagcagaataatctacctacgcgagaccatgatttttacacttcgcccatatcagcaagaagccgtggatgccacgctcaaccattttcgtcgtcataaaacccctgccgttatcgtgctgcccaccggcgcaggtaaaagcctggtgatagcggaactggcacggctggctcgtggtcgcgtgctggtgctggcacacgttaaagaactggtggcgcaaaaccatgcaaagtatcaggcgctggggctggaagccgatatttttgccgccgggctaaagcgcaaagagagccacggtaaagtggtatttggcagcgtgcagtctgtcgcccgtaatcttgatgcctttcagggtgaattttcgctgttgattgtcgatgaatgtcaccgtattggtgacgatgaagagagccagtatcagcaaatcctcactcacctgacaaaagtgaatccccacttacgcctgctggggctgactgccacgccttttcgattgggcaaaggctggatctaccagtttcattatcacggcatggtacgcggcgatgagaaagcccttttccgtgactgcatttatgagctgccgctgcgttatatgattaaacacggctatctgacgccgccagaacgactggatatgccagtagtgcaatacgatttcagccgcttgcaggcacagagtaacgggctgttcagcgaagccgatctcaaccgtgagctgaaaaaacaacaacgtattaccccgcacatcatcagccagattatggagtttgctgcaacgcgcaaaggggtgatgatttttgccgcgacggttgaacacgcaaaagagattgtgggattactgcctgccgaagatgcagcactgattactggcgacacccccggcgctgagcgcgatgtgttaattgaaaattttaaagcccagcgttttcgctatctggtcaacgtcgcggtactgaccaccggatttgacgccccgcacgtcgatcttatcgccattctgcgccctaccgaatcagtgagtctttaccaacaaattgtcgggcgcggtctgcgtctcgctccgggcaagactgattgcttaattcttgattatgcgggtaatcctcacgatctctacgcgccggaagttggtacaccaaaaggcaaaagtgacaacgttccggtacaggttttctgccctgcctgcggttttgccaacaccttttgggggaaaacgaccgccgacgggacattgattgaacactttggtcgtcgctgtcagggatggtttgaagatgacgacggtcatcgcgaacaatgtgacttccgtttccgttttaaaaattgcccgcaatgtaacgcggaaaacgatattgccgcccgccgctgccgcgaatgtgacaccgtactggttgatccggacgatatgttaaaagcggcgctacgactgaaagacgcgctggtattacgctgtagcggcatgtctttgcaacatgggcacgacgagaaaggcgaatggttgaaaatcacctattacgatgaagacggcgcggatgtgagtgagcgtttccgtctgcaaacacctgcccagcgtaccgccttcgagcagctttttatccgcccgcatacgcgcacaccgggcatcccgctgcgctggatcaccgccgccgatatcctcgcccagcaagccttattgcgacacccggattttgtcgtcgcccgcatgaaaggccagtactggcaggtgcgtgaaaaagtgttcgattacgaaggtcgttttcgtctggcgcacgaattacgcggttaatggtagttttgattgatgtataaggcgattgagtatagaatctcgcccgcttttgcatacgcaaagcagatcacttacctgttgctgggtcgcctgtagcaggattaatttaagagagaaagaaatgtttactatcaacgcagaagtacgtaaagagcagggtaagggtgcgagccgccgcctgcgtgccgctaacaagttcccggcaatcatctacggtggcaaagaagcgccgctggctatcgagctggatcacgacaaagtcatgaacatgcaagctaaagctgaattctacagcgaagttctgaccatcgttgttgacggtaaagaaatcaaagttaaagctcaggacgtacagcgtcacccgtacaaaccgaagctgcagcacatcgacttcgttcgcgcttaattgctgaataagttgtaaaaaaccccgctccggcggggttttttgtatctgcagattatgcctgattacggtattgctattttttgcaggccagataaggcgttcacgccgcatctggcattcagaacacaaaaccgattaattgccgccagacgtccggcgctgcaattggtcgcgcaaattcggcggcgtgcctttaatggtcaaggtatcggttgctggatcccagaagatgcgttcacctaacagcatcgcatcaaagttaatagtcaagccaccgccgctaccggcaaacttcgtcaactgacgcagtgtgctacggtctgccgggaagctctcttccagttcgtagcctttttcagccgcaaactccgtgaagctcacttcgcttacgcctgccagctctttcgacagcgatttcagttcgatctcttcgcctgcctgcagctgctcattacagtagctataaacctgctggcgcacgttctgtcgctctgctttatccagttgtgcttcggcagtgaaatcatcaaccgcttgcaacagcccacggttttgcgctttcgcgtttaacccttcgctggccccgaggaaatccataaagaaatccgccactttgcgccctactcgccctttcaggaaagtgagatagcgggtggactctggattggtttcccattcggttaaatcgatacgcgcaacaatatccgcatgattgatatcaagataatgggttgggttgatgtcgagattttcgttaacgcgcatactgctcaggttgctcagaactgccaccagcaaatactccaccgccagatagcgatagtggcaaaacagcacgaatccaccgtcagcaaaaggatatttcgctaattcgtcacgcaggcggccggttgccgcgcggctaaatgccaggaagtcctcttcgccctgacgctgtaagcgcagcgtctgcgccagttcactctcttcgctaaacaagccgtaagctttatttttggcgctatagacccgatgcagttctgccaccatctcaacgacggtttctgtcggttccagcaatgaatcgcgcaacaccagctcaaggttctgctcatcacgcttgataagctggtgcagagcaatctggttgatatccagactcatgataaactctcctttaagaccgggcggtattcaaccaccgccggttaagcgacgcaataaaagatggcggtcattttacagaaggcagcgtaacgagaatgatttaacgcataaaaaagcagaaaaaaaaccgttgctacggtaatatgttgccctttcatcaactaactgatttcgatttatgccacaaatttcccgctacagtgatgaacaggttgaacaattgctcgcagagctgctcaacgtactggaaaaacataaggctccgaccgacctttccctgatggtgttaggcaacatggtcactaaccttatcaacaccagcattgccccggcccaacgccaggcaattgccaactcttttgcccgcgccttacagtcctctatcaacgaagacaaagcgcactaagggaaacagataacaggttatggtaactcatcgtcagcgctaccgtgaaaaagtctcccagatggtcagttgggggcactggtttgcactgttcaatattctgctttcgctcgtcattggcagccgttacctgtttatcgccgactggccgacaacgcttgctggtcgcatttattcctacgtaagcattatcggccatttcagcttcctggtgttcgccacctacttgctgatcctcttcccgctgacctttatcgtcggctcccagaggctgatgaggtttttgtccgtcattctggcaacggcgggaatgacgctattactgatcgatagcgaagtctttactcgtttccatctccatcttaatcccatcgtctggcaactggttatcaacccagacgaaaatgagatggcgcgcgactggcagctgatgttcatcagcgtgccggttattttattgcttgaactggtgtttgcgacgtggagctggcaaaagctgcgcagcctgacgcgtcgtcgacgcttcgcgcgcccgctggccgcattcttatttatcgcctttatcgcctcgcatgtggtgtatatctgggccgatgccaacttctatcgcccgatcaccatgcagcgcgctaacctgccgctttcgtacccgatgacggcgcgacgttttcttgagaagcatggtctgcttgatgcgcaggagtatcaacgccgtcttattgagcaaggtaatccagacgccgtttccgttcagtatccgttaagcgaactgcgctatcgcgatatgggcaccgggcagaatgtgctgttgattactgtcgatggcctgaactactcacgcttcgagaagcagatgcctgcgctggcaggttttgctgagcaaaatatttcgttcacgcgccatatgagctccggcaacactacagacaacggcatctttggcctgttctatggcatctcgccgagctatatggacggcattctgtcgacccgtacgcctgcggcattaattactgcgcttaatcagcaaggctatcagctggggttattctcatcagatggctttaccagcccgctgtatcgccaggcattgttgtcagatttctcgatgccgagcgtacgcacccaatccgacgagcagaccgccacgcagtggatcaactggctgggacgctacgcacaagaagataaccgctggttctcgtgggtttctttcaatggtactaacattgacgacagcaatcagcaggcatttgcacggaaatatagccgggcggcaggcaatgtcgatgaccagatcaaccgcgtgctcaatgcactgcgtgattctggcaaactggacaatacggtggtgattatcactgccggtcggggtattccactgagcgaagaggaagaaacctttgactggtcccacggtcatctgcaggtgccattagtgattcactggccaggcacgccggcgcagcgtattaatgctctgactgatcataccgatctgatgacgacgctgatgcaacgcctgctacatgtcagcacacctgccagcgaatattcgcaaggtcaggatttgttcaaccctcaacgccgtcattactgggttaccgcagcggataacgatacgctggcaattaccaccccgaaaaagacgctggtactgaacaataacggtaaataccgcacttacaacttacgtggtgaaagagtgaaagatgaaaaaccacagttaagtttgttattgcaagtgctgacagacgagaagcgttttatcgctaactgattaattataaatcagttagcgaaatatcttacttgcaatcggtgtggaaaacggtagtattagcagccacgagtcggcacgtagcgcagcctggtagcgcaccgtcatggggtgtcgggggtcggaggttcaaatcctctcgtgccgaccaaaaatcccaagaaaaaaccaacccttacggttggtttttttatatctgcaattaattcgataaacagaccgtgacacatcacagcctgtttattttctgttatcagaacgtccagaccacacccgcctgagtattccacggcgattctacccctgcgccattgccatagctgactgacaaatgaccgcttaacgtcggggtaaacgatgaccttataccagcctgataaacgccactggttccagccacatcattattaaatttgccatcgtcattaactttcacctggttagaatcggcgtattcctgacgcacggccgctttcagccagggttccagcgtcgtaccgttttgcaggtccatgtgatagcttaccgccgttcccgcttcagcgcgtaatatccgggtatttcccacatccgcgcgcatgccgtttgataacgtgtagtcctgaccatctgtggtaaagccggtaaaggccagatagggtctaacactccacaatccgtcaacccaacggaacccgctctcaacatgagcacccgcgccgttactattgtaatcgccaaacgctgttgccccattactcatcttgccatggatggtgttggcaaaacggtcaactttcaccaccccatcaacataggcaccgttctgatgctcccaaccggcataagcccccagggtatagctatcgatattacctttgccgccgcgatcaaaaccaatatcagaatgagagtaaccaaagatcaagccgcgaattgtactgctttcttcacgggagaaacggctatcgataccgagcgtcaggcccgtcaatgtttgctcaaaaccagctcccgcatcagtggtcacgttgttgcgggtgttaattgccgaactccacatcgccgtatcgtaactaacgccttttacgctaccaagacgctcacgcacggtgtccagttctgcatcaaataccagcggttgtgcggccgccatattcagcacatcagtggttgaaggggtaatttgcgcgcgattctctgccagactccagctatggttgccattatccagcaaggtatattcatacgtaccgatatcaacaacgcctccggcattgcccaacgtaaatgcagcatcaccgccgcccgttgttaccagtgtaaggctatctcctgctgccgggctggcaccggtgtccgtcacgaatattttgaaatcacctgttgcctgaccggtgacgttgagctgatcgctctgatgattagccatatcggtacgcatataaaaattgccgtttcccgacagggtattggtggtcaacgtaatgaaattttccgcacttgccgtcactgatgaacgagtcactggctcatccatcataatcacatttgcgtcagacatcgcaaggttggctaagttgaggagggtgttttggttcgtcgtagtgatatcggcaatgatggtccatacgctattttcgagcgaaacgtccgctttgctggtatccacggcaccatgcgttctaaaagaagcgccctcagaaaccactaccttacccaccaacattgcgggtgcataatttatttgcggcttcatgacctcaagaatgccatcattccctctgactgaaacgttaaccattgtgccagcccagacgttagcgcggccattgttgataaccatattttcagagatggcttttgaggaatacgtgatacttccattctgatatgatcgaccgagatcatataccgcatttgcctgcactttcgtaccagtatcctttcccagcgattgcatagtggcatgcttatcaaggatagtatcaatggcctgcgtgtcctccataacaatgagcccggaaccatcatccagttcataattttttgacacaccatcttttatactaaattggcctttactgtttggaccactcacttccagcgcattcgttgagacaattaattttccgcctgcttttttatcaacgccagttacagtcccgccatccataacctccagtaagccgccactatctacagtggtattataagcgaagtcattttcttcaactcgcaaacttccgccgttttccaacaacatattattagcaataccattcttgatatcgaactgaccgagacggtttgttccgaatacctccatggcccgcgtggttgttttaatagcaccgcctgctttctgatctaccgcaaatgcaaatcccccctctttaacctccagtagtcctcccttttcgatagcgacaaagacggcccccccatctttttcaacgattaagcgcccgcctttaatcgtggtatcattcgctgcgccataaacctgtagcacaccattattgagcgtagtctggtttgccgcgccacccatttgaacaatttgataaccgtcatttaatactgagtattctgcggcgccattcatttcaatgtactgataccctccgttaatttcagtattattacttacaccaaattcttttatatgctgttctccgccaggattgattttcgtattattggcggtcccataaaccagctggatatctttttccaggacaacaccatcaactgtctcaccatactcaacagttgatgccaatgctatgggtgaatataaggaaggtgcgaataagcggggaaattcttctcggctgactcagtcatttcatttcttcatgtttgagccgattttttctcccgtaaatgccttgaatcagcctatttagaccgtttcttcgccatttaaggcgttatccccagtttttagtgagatctctcccactgacgtatcatttggtccgcccgaaacaggttggccagcgtgaataacatcgccagttggttatcgtttttcagcaaccccttgtatctggctttcacgaagccgaactgtcgcttgatgatgcgaaatgggtgctccaccctggcccggatgctggctttcatgtattcgatgttgatggccgttttgttcttgcgtggatgctgtttcaaggttcttaccttgccggggcgctcggcgatcagccagtccacatccacctcggccagctcctcgcgctgtggcgccccttggtagccggcatcggctgagacaaattgctcctctccatgcagcagattacccagctgattgaggtcatgctcgttggccgcggtggtgaccaggctgtgggtcaggccactcttggcatcgacaccaatgtgggccttcatgccaaagtgccactgattgcctttcttggtctgatgcatctccggatcgcgttgctgctctttgttcttggtcgagctgggtgcctcaatgatggtggcatcgaccaaggtgccttgagtcatcatgacgcctgcttcggccagccagcgattgatggtcttgaacaattggcgggccagttgatgctgctccagcaggtggcggaaattcatgatggtggtgcggtccggcaaggcgctatccagggataaccgggcaaacagacgcatggaggcgatttcgtacagagcatcttccatcgcgccatcgctcaggttgtaccaatgctgcatgcagtgaatgcgtagcatggtttccagcggataaggtcgccggccattaccagccttggggtaaaacggctcgatgacttccaccatgttttgccatggcagaatctgctccatgcgggacaagaaaatctcttttctggtctgacggcgcttactgctgaattcactgtcggcgaaggtaagttgatgactcatgatgaaccctgttctatggctccagatgacaaacatgatctcatatcagggacttgttcgcaccttccataacgctgtagccaccagaacagatattgcggaacgacaaagagaaacagaaccagattgatgcattgagctttcatcctatgaaattaattgctgttaaaagcattgggtacagaaaatacccatagctccatacccggagtcagtttttaaaaactgtttaaagaaatgcacaagtattgtgattgattttttagttgtttttcttgatgagaagctgatgcaaaattccgtctttataatgaaaatgatgccaaagcgaacgacaaggttgtagttttcactacatgtccatacataaaatggggtaacattcacgcgcctggtagcgttaccaacgctacgctcaaacataatgattctaataaaacctcaggagactactatgcctgaagcaacaccttttcaggtgatgattgtggatgatcatccacttatgcgacgcggtgttcgtcagttactggagcttgatcctggctctgaagtggtcgccgaagcgggcgacggcgcgagcgctatcgatctggcgaatagactggatatcgacgtgatcttgctggatctcaatatgaaaggtatgagtggcctggatactctcaatgccttgcgcagggatggcgttaccgcgcaaattattatcctgaccgtatccgatgcctccagcgatgtctttgcgctgatagacgcaggcgcagacggttatctgttgaaagacagcgacccggaagtattgctggaagcgattcgtgccggagcgaaaggcagcaaagtctttagcgaacgcgtcaatcagtacttacgtgaacgtgaaatgtttggcgcggaagaagatcccttcagcgtgctgacggagcgcgagctggatgttctgcacgagctggcacaggggctgtcaaataaacagattgcctcggtgttgaatatttccgagcagacagtaaaagtacatattcgcaatctgctgcgtaaactcaatgtccgctcacgcgtggcggccaccattctgttcctgcaacaacgcggggcacaataaaaatagcccgatggatttatcatcgggctgagatttatgacaaacgcaaaactgcctgatgcgctacgcttatcaggcctacgtggatcgatcaatttattgaatttacacaattttgtaggccggataaggcgttcacgccgcatccggcataaactaagcgcactttgtcaacagtctagcccgatggcatcaccatcgggcctctttttatttactctcctgcggcgacaaatgttgcatcgcctgcgcgatactacgttcaatcaccgcacggcgagtatcgttggcaggtaagagtttcaacatcatctcccacgcggcaacggcttcgccaaatcgctgctgctcaaaggcattaaacgcatacatgcttagcacacggatattgctatggtccgttctcaccagctgacgtagcagttcaccgccgaggcggttgtcgttgggatcagatgaacgagtcaacgcttcagcgtatcccagtgcagcatcactgtttttcggatcgaggcgatacgcagtggcgtatgcatcggtggcgatactggcgttacccagcgccatgccaacgcggcccaacataatccagccttctatatctcccggatttttttgcagttgagtacgcatccccagcgcaagacgcgacatctcttcttcgttgagcggatcggctttcggatccagcgccctgtccagcaacgccggagcctgtgccgtggcctgctgccagattttcacctgctgataattgccagtctggtagtagctgacgccagccacaattaacgccaccacaatacccggcagataaacaacatatccggcacgcttaccttccggcacgctttgttcaggaaacgcttccggcaccacgcgtacccgacgccgcgagcgggcgtatatgacccaaccgccaatgccaatagccactactggcagcacccacagcagcacggtcagcggcgttaacggcggatcgtaagtgacgaagttgccgtaacgcgccaccatataatcgacaatctcttttttacttttaccttcctgcatcagttcatacactttctgacgcaggtcggtggcaatcatcgagttggaatcggcaatgctgttgttctggcatttcgggcagcgcagttcttcagtgagctgacggaactgttgttcctgtgcttcatctttaaactgcaacacatcgatggtcgccagcgctgagccggagatcatcagcatcagcacgcccaataaaaacctcattgtgcggcctccttactgtatttctcccacagcggcttgatctcttcttcccagacgcgaggattcagatcgcccgcatggcgatagcgaatgatgccgttgccgtcaataagaaacgtttctggcgcgccatagacaccgagatccagccctaacatgccatcgccatcaaacaggcttagcgcgtaaggattgcccagctctttcagccagctgattgccttctggcgatcgtctttatagttcatgccgaccacgcggatgccctgcgcagaaagctgattcagatattgatgttccgcacggcaggtcggacaccaggtcgcccagacgttaagcagtactggtttgccctgagtcagcacatccgcctgataaaactgccccggattgtccagtgattcgagacgaaacttcggcacaggcttgccaatgagcgccgattccagattggtcggatcatccccttcggcattacgcgccagctgccacagcagcgccgcggcaatcgccaggaagataatcaacggaattaacaatactttgcgcttcatacggcctccggcgcagttttttgcggactcacgcgcttacgatagcgaggatcaaacagacacagcagtccgcccaacgccatcatcagcccgcccgcccaaatccagcgaacaaatggtttgtagtaaagacgcacggcccacgcgccgttttccagctcttcaccgagggccgcgtacaggtcacgcgtgatgccgccgtcaattgccgcttcggtcatcatcgacccggcagtgttgtaataacgtttttccgcatacagcaccgtttccggcttgccatcgcgcgttacgccgatagtcgccacaccgccacgccagttcgggccagtcacctctttgacatcacggaaggtgaagcgatattcatgaatatcgacgctatcgccggacttcatgcgcacatcacgctcaacgctatagttctggctaaaggcaatgccaacaattgtcactgccagcccaaggtgagccgccaccatcccccaataactgaaggtggttttcgtgccgcgtgaaatacgtagcgcagcttccgcaattgccagcaccgcaatccagcaggccattgccaggccgagcaccgtcatcgccacaactttgctttcgaacagccacggcaacagcagcgacagcaccagcgtagagatgaaggcgataatcaataaattgcggatcttacgcgggcgatcccgcccccagcgcaccagaggaccgacaccaagcagtagcgcaaacggcaccatcagccaggtaaacatggtgttgaagaacggttcgccaatcgaaatactgcccagtcccagttgcttatgcaccaacggcagcagcgtccccagcaacaccaccagcatcgcagcgaccagcaaaacattgttcgctaacagcaaagattcccgcgaccacagcgcattgtttacgcgtgagcgaactttgtgtccacgcgcggcaaacagcagcagcgaaccgccaatcaccagcaccataaaggcgaggataaacataccgcgcgccggatcagacgcaaacgcgtgtaccgataccagcacgccggaacgcacgaggaaagtccccaacagacacaacgagaaggcactgattgccagcagtaatgtccacgctttgaagctggcgcgttgttcagtgaccgccagtgagtgcatcagcgcagtccccaccagccacggcataaacgaggcgttttctaccggatcccagaaccaccagccaccccagccgagttcgtaataggcccatgcggaaccgagcacgatgccgagcgtcaggaagatccacgctgccagcgtccacggacgagtaaaacgcgcataagtgctgtccagacgcccgctcagcaaagaagcaatggcaaaagcaaacgccaccgagaaacccacgtaccccatataaagcagaggcggatggaagatcagccccggatcctgcaatagcgggttaagatcgcgaccttcaatcgggaagttcggcaacgtgcgagagaacgggttagaggtaaagagaatgaacagcaaaaagccgacactgaccatccccattatcgccagtacacgggccacaatatccagcggaatacgctgactaaaaatcgccaccgcaaaggtccagccgctcatcagcagcacccacagcagtagcgagccttcatgcgcgccccaggtagccgccacgcgataccacaccggaagctgggtattggagttgctggcaacataggtgacggtgaagtcgttgaccacgaaagcattgaccagcaccagaaatgcgccagccacagacataaacagcagccaggcaaacaagcgggaagacgccatcatgcgcgcatctccgcgcgccacgccccatagcggatacacggacagcagcagcgcaattcccagcgccaggcacagcagtccgttaccaatttctggcatcatgatgctgggtccttataaacactcgccgggcgacggtggttagcttccatcgctttctcaacttctggcggcgtatagttttcatcgtgtttcgccagcacttctttcgcgaggatatgattgcctttttccagttcgccctgcaccacaacgccctgcccttcacggaacagatccggcaaaatgccttcgtaagagacatccactgagccttcagcatcgtaaatggtgaaggtcactttcagcgaattgggatcgcgctgcacactacccggcatcaccatcccgccaacgcgcagacgctgaccgacttccggcatttgctgagtttcacgcttgccgtagagaatttcccccggcgtataaaagagatcgatattcgagcgcagcgcatatagcaccagaccgatagtcagcgccagccctgccaacacggcacaggcaatccacaagcggtttttacggcgaatattcatgcagcctcctgctgttgcgcagcacgtaaacgcgcctcacgcgcccgctgttgcgccacgccacgcagaattgcgcgatgttgcatcaccgagtgcacgaccaaaaccaccagcggaataacggtcatcaccaccgccagccagacaaaaaaggcgtaaccgcccattgcgaaaaattcattccaggaagcaaatgcaggggtcatttacggcctcttttcagtatcagttcactcacccacggacggcgtttttccatcagcaaaatcaaattacgcatccgcatcagcgtcagcgtggcagacaggagcaggaagccaaaaatcgaccagcgcagcggcgaacgcatcgccggatcgatactttgctgcatccgcgttgatccctgatgcagggtgttccaccactccacggagtaatgaataatcggcagattcaccacgccaatcagcaccaggatacctgccgcacggcccgccagacggcggtcgtcgaaggcgtgccacagggcaatcacacccacatacaaaaacagcagcaccagttcagaagtcagacgtgcatcccatacccaccaggtgccccacatcggttttccccatgcagagccggtaaccagggcaataaaggtaaacacggcaccaatgggggccatcgccgccaccgccaggttggccattttcatctgccagacaaggccaataaacgctgccactgccattgatgcataaatgcccatcgaccagatcgccgcaggcacatgcaggtagataatgcggtagctatttccctgctgataatcagccggagcaaagccgaatccccagatccagccgacggtaagcacgaccacactggcaattgccagccacggtataaaccagccacagatttgatacagccgtggtgggatcgccagttgatgcagtgttttccacatagtttcgataccagactcgaacaaaaatcagtaatccagcgttattgaatgctgattcgtaacgctgccgccgtcgcaaaaggacttaatgtcgcggtgcctgccagcaacgcgcctaaaattgccagatacccgtcaacgggcaaatgcatagaagccgcgtccatcgcggcggtggcaaagatgagtaatgggatagtcagcggtaacaccagtatgctgagcagcacaccaccgcgcttaagtcccactgtcagcgccacgcccggtgcaccgagaaagccaagcgtaggcgttcccagcagcagcgtcagcgccatcacttgccagccataaacatccattcccagtagcattgctaccagtggcgaaaggatgagtaacggcagaccggttaccatccagtgcgccatcaccttcgccagcacaacggcgggcaagggtaacggcaacaacatcaattgttcaagactgccgtcctgcaaatcgtcacggaacagtcgttccagcgccagcaaggatgaaagcagcgcagcaacccagataatgcccggtgcaatacgcgccagcagttgcggctccggaccgatactgagcggaaaaagggtaattacaatcaggaagaaccacagcgggttggcgatttcggcgctatggcgaaacgctacacgcagctcaagacggaaaatgcgccagaacatcatgcggccctcgtttgcgtcagtgaaatgcggcgaattttactttcagcaacgttgagcggctggtgggtagtcagaatcacaatccccccctgctccgtatgctgcgccatacgctgggtcagacgatcgacaccgttaacgtcaatcgcggtaaaaggctcgtcgaggatccataacgtggcacgggtcagccacagacgcgctaaagcgacgcggcgttgttgcccggccgagagctgatttacaggaatatcttcgaatccggcaagcccggcctgcgccagggcttccagacattgtgcggtatcgccatcgcgatgataaaagtgcagattttctaacgccgtcagccgggttttgatccccggctgatggcctatccataacaggttttgatggtagctgtcgcgtacctgatgcaagggctgcccttgccagagaacctcgcctgcgtcagggcgagacaaccccgtcagcaaacggagaagcgttgtcttccccgcgccgttgctaccggtgatttgtacccactctcctgcgttcagcgtaaatgacaagccactaaataaggttcgttcatcccgctcacaaagtaactctctggcttcaagcatacccacgcaataaccctgttaaaaacctggctcgacttcacgcatatcgggcagcttgtgcgctatccctttatggcaatcaatacaggtttgcccatctttcaccgcctggtcatgcatcttcgcggcaaccgatttctgggcggttgtatccatatactcgaagttgtgacagttacggcactcctgcgagttattgtccttcatgcgccgccactcattctgtgccatcgtcagacgatgagcttcaaatttctgcggcgtgtcaataacgccaaaaattttaccatacagctctttacttgctttgagcttgcgtatcatcttcggcacaaactcgtgcggaacgtgacaatccggacaggtcgcacggacgccgctacggttgttgtagtgcacggaatccatgtattcctgatacaccgtgttgcgcatttcgtggcagctaatgcagaactcttcggtattggctttttccatcccggtgttaaagccaccccagaagacgatgccgccaacaaaaccgatcaacagcagcgtccccagcgccagacggctgggggtacgccaccatttccacaggcgcttaatcagaccaggcttacggtcagaatttcccataataacctcttatttcccgtaaccttttgatggggtaaaggtattccccacgattggcgcggtatcggcctgcggtacgtgacattgcagacagaaataacgacgcggagccacttccgcgcccactttgccgtcgctgtccataaagtgagtaggactgatacgcggcgcgccagtggtgcgatagctttcgacaccgtggcactgcaagcagcgattggtattggtcgttacctgataaccttcaacgctatgcgggatcattggcggctgattcacatagttcagcggcatccgatcctgctcttttggcatccgaatggccccttcctgtgtcccggatacttccggcgactggctaaaatcgacgccattagccgcccaaaccgcgccgcttaccaccagggccagcatcgccgtccattgacacagcgctttcttcaggtcatggcttttcatgatttcgctcccgaactccatcgtgtagttattgtaaatacatcctcagaacagacatccacgcagcgaccgcacgtcatgcaatcgcggctggtgacctgcaccgggctttgttcatccagcaccggggcacgtagcacatgcggttccgggcaaacatgaaaacaatccatacagcggttacatttctgccgatcggtggccgcaacggtaatcacacctttgctacccagcacgccatacagcgcgccaaccggacaaatgtgcccgcaccagccgtgttcaacgaccagtagatcaaataaaaacagcgcgagaataagcagcgcgccgctgccgaagcccattaccaggctacgccccatcagagaaacggggttgatccattcccaaatgagcgtgccagttaaggctgatcccaccagaatgaccaccaacagcacgtagcgaatgtggcgagggatcgtcgcagactgattgaggtcaaagcgcctgcgtaaccagttcgctaagtcggtaatcgggttcagcgggcagacccagctgcaaaataatcgctttcccgccagggcgtagagcacggtgataatcaccgcaccggtcaacgccaccgtggcaggcagatgaccactggcaagactttgcagcgtcatcagcggatcggtcagcggaacggtgtcgaataacaggctactgctgtagttgccgtgcaagatccacacaccaaaccatggaccgctcaaaaacatccccagcacgaagaactgacaaaggcgacgtaacaccagccaacggtgactgcgccaccagccttttttctccagcgcctcgcgcccggcgtcacgtttacgatttgccattgttcccctccagccagccgaagcggtaatggtgacctaactcccctttcgccagtgacagcggtaacaccttgattgccggttgttccagcacgcatactttttcgcacttaccgcaaccggtacaggcgtcgctgtgaaccgtcggcagaaagcgggcgtgcttaccggtacgcgtgttgcgctccagctccagggtgatggcctcatcaattttcgggcattcgcgataacaaacatcgcagcgcagcccctgaaagttgagacagttttcctggtccaccagtaccgccagccccatccgcgcgtcgtcgatcgattcaatctcacgatccagcgcaccgcttgggcacactttggcgcacggaatgtcctcacacatttcgcaaggaatatcccgtgcgacaaaatatggcgtgcccgccgacagaccagaggccagcgtcgccagttttaaggtgtcgtaagggcaagcctgaacacactgaccgcaacgcacacaggcactggcaaaggcgttctcgtttatggctccgggcgggcgcaaccgcacgccagatgcgcgtgcggtttgctgttgtaaccccagcgccacacccacggcagccagcccgcctgctgtgcgaacgacatcgcgcagaaagcggcggcgaccattttgaggtttcgctgaccgggacataatggcttacaccttctccagtttgaccgcgcacttcttgaagtccgtctctttcgagagcggatcggtcgcatccagcgtcagtttgttaaccaactgtgcggcgtcgaagaacggcatgtacaccaggccctgtggcggacggttacgaccgcgcgtttcaacaatcgagatcacttcgccacggcgagaaaccactttcactttgtcgccacggcgcagatcgcgcgctttcgcatccagcgggtgaataaacaggaccgcttccgggaaggcgcggtgcagttctggtacacggcgagtcatactgccggtgtgccagtgctccagaacgcgtccggtagagagccacaggtcgtactcttcatccggtgcttccgccgccggttcgaatggcagtgcgaagatcaccgctttgccatccggtttaccgtagaacttatagccttcgcccgctttcacgtacgggtcgttaccttcgctgtaacgccactgcgtttctttaccgttcaccaccggccagcgcagaccgcgcgctttgtggtagtcatcgaacggtgccagatcgtgaccgtgaccgcgaccaaaccatgcgtactcttcgaacagccctttttgcagatagaagcccagctcgcgggattcatcgttcagctgatcttccgccagttcggataccgggaatttgctcacttccggtgtggcatacagcacttcgtacagcgttttgccacgcagttccggtttcttcgccagcagatcttccggccatacttcttcagttttgaagcggcgggagaactggactaactgccagagatccgatttcgcttcgcccggtgcctgtacctgttgacgccagaactgagtacggcgttcggcgttaccgtaagcgccctctttctctacccacattgcggtcggcaggatcaagtcggcggccagcgcactgactgtcggatacggatcggagacgatgatgaagttgcgcggatcgcgccagcccggcatacgctcttcattgatgttcggcccggcctgcatgttgttggtacacatggtccagtaaacattcagtttgccgtctttcagcgcacggtcttgtgccaccgcgtgcagaccgattttcgccggaatggtgccgctcgggatattccacttcttctcgcagatatcacggtgtttctcgttggtcaccaccatgtccgcaggcagacggtgagcaaaggtgcccacttcacgcgcagtaccacacgcagaaggttgcccggtcagggagaacggaccgcaacccggctgggaaattttgccggtcagcaggtgcaggttgtagaccaggttgttagcccacacgccacgagtatgctggttgaagcccatcgtccagtaggagatgactttcttgttcggatcggcatacagctgcgccagttgttctaactggtctttcggcacgccggtcatttcggcagttttttccagcgtatactcggcaacgaaggctttgtaatcttcaaagctcatcggttcggaggcgtcagaacccggattcttcgctgctttttccagcggatgggtcggacgtaaaccgtagccgatgtccgtcgcccctttgcgcaggttaacgtgcttgctgaagaagtcctgatttatcgcattgttttgaatgatatagttggcgatgtagttcaggatcaccaggtcagattgcggcgtaaagatgatgccgttatccgccagctcgaagctacgatgctggtaggtagaaagcaccgccacggtgacgttctggttagagagacgacggttagtgatgcgcgaccagaggatcgggtgcatttccgccatgtttgcgccccacagcacaaacgcgtcagcctgctcgatgtcgtcatagcagcccatcggctcatccataccaaaggtacgcataaagccaactactgccgacgccatacagtgacgcgcgttcgggtcgatgttgttcgaacggaagcccgctttaaacagcttggacgcggcataaccttcccagatagtccactgaccagaaccgaacataccgatcgattccggccctttttctttcagggcggttttgaatttctcttccatcacatcgaaggcctgatcccaggtgattggggtaaattcgccttctttgtcatatttaccgtttttcatacgcagcagcggctgcgtcaaacggtctttaccgtacatgattttgggcaggaaatagcccttaatgcagttcaggccacggttaaccggtgcgtccgggtcgccctgacaggccaccacacgtccctgctgcgttccgaccagaacgccgcaaccagtaccgcagaaacggcacggcgctttatcccatttgatggcttcctgctgaccaacaacggcgcgggcaacgcccggcacgctgagaccggcagccgccgcagcggccgcaacggcgttagctttcataaagctacgacgactgagtttcatggtgtttcctcaccttgctcttcctgctggtgataaaccagcgacaccgccagcacgccctctacgttgcgtactgactcaatggtttggatcagcgtttcgctgtcttctgcttccaccaccacaatcaactgaccgctcggcgcgtcgctgacagcaacttcacagccgggaaaggcgttcagttgggtgctgatgtctgaaattcgttcgcttttggcctgcacgaccaggctgcaaacttgccagttagtgtgcatggagatactccgcagttatggctgataccggacagctggctgcacatgctccacatccgttgcaaagttggctattaagttgcggctggtagatcccggagagcgtcgggcgaaagataattgccattggctcacagctatcctgacagcggcggcattcaactgactgatacgccaggcacgcgtccccgatggtgaactgcaaatcccaggccctggtgtggcgcggagaaaatagcgattcggggcaagcctgcgcgcaggcgtaacagaagctgcactcgttatttttgaaattaacgctcggatagccgcccgcgccgcgttgcagaatgttgttttcacaagcattaatacaggcgtcgcagcgggtgcaatgggtcagaaaatgagattcatcaccggaccagggcggacggataccgttactggctttgcgccagcgaccagtgagtatgccccgacgggatgcatcaatcttcacattgaccttccatcattaacgcgctctgaaaattgagagcgaccaaataaaccgcataattaataagccatttttatagccgctaagatattaaaggatgtgtcaaagatgcataccccgatcggggtaaaacctgtagcaggatcaaaagagtggcgggaagcgtggcaaaaacgggcttttgctcacatttcaaatggttataaatatatttatatagcgattgattcaccagagatatttctgctggtttgctctctcattagaatttaacactaaaagagcaggtaaaattgtctgaatgttctttaagttattcataaagcaaattaataaatctgatgaatatgttaaccttcagcgacatcatcggtgaaaacctataaatgaagaaggaaagcaaaaaaatgaagaccattctacctgcagtattgtttgccgctttcgctaccacttccgcctgggcggcagaaagcgtccagccactggaaaaaatcgcgccttatccacaagctgaaaaagggatgaagcgtcaggtgattcagttaaccccgcaagaagatgaatctaccctgaaagtagaactgttaatcggtcagacgctggaagtcgattgcaatttgcatcgtctcggcgggaagctggaaaacaaaacgctggaaggctggggctatgattattatgtctttgataaagtcagttccccggtttcaacgatgatggcctgcccggatggcaagaaagagaagaaatttgtcaccgcgtatctgggcgatgctggaatgctgcgttacaacagcaagctgccgatcgtggtgtatacgccagacaatgtagatgtgaagtaccgcgtctggaaggcggaagagaaaattgacaacgcggtagttcgctaaactgccgtgaagtgcggcaccccgtaggtcagacaaggcggtcacgccgcatccgacatccaacgcccgagccggttgcctgatgcgacgctggcgcgtcttatcaggcctacaccgctgtgaagtgcggcaccccgtaggtcagacaaggcggtcacgccgcatccgacatccaacgcccgagccggttgcctgatgcgacgctggcgcgtcttatcaggcctacaccgctgtgaagtgctccaccccgtaggtcggataaggcggttacgccgcatccgacatctaacgcccaagccggttgcctgatgcgacgctggcgcgtcttatcaggcctacaccgctgtgaagtgctccaccccgtaggttggataaggcggttacgccgcatccgacatccaacgtccgagccggttgcctgatgcgacgctggcgcgtcttatcaggcctacaccgctgtgaagtgctccaccccgtaggtcggataaggcggttacgccgcatccgacatctaacgcccaagccggttgcctgatgcgacgctggcgcgtcttatcaggcctacaccgctgtgaagtgctccaccccgtaggttggataaggcggttacgccgcatccaacatctaacgcccgagccggttgcctgatgcgacgctggcgcgtcttatcagcatacgccacatccggcataccatgccggatgtggcgtatcattacaacgcaatatccgccacttctttttgaacgggttgcggtttcaactgcggtttcggcgtactatctgctgcctgcggcttgtcgtagttcaaccccagcacttcgctggtgtactgcaactcgcgttctgttgccgctacatcaccgttcagcttgcgtccataagacggaacgatcgctttcaacgtagcctgccattgcgggctggaaacacgatcgccaaatactttttccagcagattcaacataatcggcgcggcggttgacgcccctggcgatgcccccaggagcgcggcaatggttccttgctggtcactgacgacttcagtacccagacgcagtacgccacctttctcggcatcacgcttgataatctgcacgcgctgccccgcttgccacaaacgccagtcctcttttttcgcctgcggatagtactctttcaacgcttcaaaacgatcctcttcactcaacatcacctgactcaccagatatttcaccagatcgaaattatccagcccgacgtgcatcatcggcatcacgttagaggtggtggtggaactcattagatcccacaatgaaccgtttttgaggaatttggttgagaaggtggcaaatggcccaaacagcactacgcgtttaccgtccagaacgcgggtatcgatatgcggaaccgacatcggtggtgcgccaacggatgctttaccgtaaaccttcgccagatggtgattaaccacgtccgggttttccgaaacaaggaactgtccgcccaccgggaaaccggcgtagtctttcgcttccggaatccccgattcctgtaacagcttcagcgccgcaccgcccgcgccgataaagacaaatttggcacgaatgttctgtgcagtgccatttttcagatcggcaacggtaacggtccaggtgttatcgtcattacgctttagggcgcggacttcgctgctgagttgcagcgagaagttagatttcttctgcaaggaagcaattaactggcgggtgatctcgccgtagttcacatcggtaccaatttccgtacgcgtggctgccactttctgttgcggatcgcgcccttccatcactaacggtgcccactctttgatctgcgcgtgatcttcagagtaacgcataccgcgaaacagcgagctttgttgcaacgcggcgtaacgggcgcgcaggaaattgacgttatcctcgccccagacaaagctcatatgcggaacggtattgataaatgaacgcggagtacgcagcacgccgcgctcaacctggtgcgcccagaactggcgggaaatctgaaatgcttcgttaatggcgactgctttttcaatactgatgctgccatcggcgttttgcggggtgtagttcagttccatcagtgcagaatgcccggttccggcgttattccagccgttcgaactctcctgcgcgacaccctccaggcgctccaccatggtcatcgaccattcaggctccagctcgcgtaaataggtccccaacgtggcgctcataatgccgccgccaatcaacagtacatcagtttcctgctcctcggacgctttcgcttttgccgccatcgaaacggcattaagccccacggccatcgagaagagcatggcagtcacttttttcatcttgttaatgccttacttttagtcgctttattgcaggtgagatttgcgcggcatcaacggtaacacttaagtaacaacatttaaataatgtttataaattatattctaattttagaaacattataatttcgttgattaattatagggttattagaaatgaagggatttttagcatattgacctgacggcagcagtccgccaggtcagcgtcgtaatattatgccgtccgggcaacggcatcacgcgaagcggcatcgcgctcttcgcccgtcagctcgctaagttgcccattgcgcatttccagcaggcggtcggcgtggataaagtaatgatcatcatgactgatagcgaaaatagttttacccatctcctgcatcagcggcagcaacacctgataaaactcacgacggaagtgtggatcctgatccgccgcccattcatccagcaggataatatcgcgttcttctgccagcgccagcaacagcgccacgcgttttttctgcccttttgataacttcaggttaacaatacgcccgttgcttaactcaagcttatgagccattttcagctgcgccagccacttctcaaccagttgcgggttagcgggtttaccctccggccccagcagttgatcaaacagccagacatcggtaaacactgccgaaaacagtttgcgataatcttccggttgttcgccgctgacaggtttgccatccagcaagatttcgccgctttgtggctgatacaagcccgtcaacaacatcgccagcgtcgattttccgctaccgttgccgccaatcagaaacagcagctcgccacgtttgatggtgagattaatcggaccaacggaaaacgcgttatcctgataagcaaacgtcacgttacgcagctccagcgtttgccagttgggaaacgcctgcgggcgcggaaactctgctttgaaaggcgcgagcgcgaatttgttcagcttgttaaacgccacctgcgccgtcagcagcgtcggcaatgcgccaaccgccgaaagcagcggcgtacgcaggaataaaagcgtcaacgaataggtcgcggcaacgttggtatcagcccaaccgaggctgttcgccatccagaacaccaggccgattgcgcccagcatcatgatgtttgaccagttcacggcactaagatggaaggtgtctgcgcgaataatatggtggcgatactcttgcgcatcaggaatgtagaggttgttaaacacatactcggcgcgttcccggttcagagtcagctctttgcgcccttcaagtacagtttgaaaatccgtgtacagcttgtcttcggtttcacgcagggtcgccatatgtttgtacacccgcgccaccagcacaaaaccgccccagatggtgatcgccatccagatagccgttaccagcaacattttgcccgacagcatccacagatacgccgctgaaccgatagtgagaatgatcccctgcaccagttccggcagacgcacaaaagcaatggtgatattgcgcacatcgctggttaaccccgccagcaacgaggcgctaccgagttgttcaatgcgctcgacgtgagtatccagaatccgcttgataaattcactacgcagtcggtaaacgaagtgatgccccaaagtggtgagcgccagttgcgatccgagagtgactgccatcaacagcagcaataatcccagaaactccggcaacaccagcagactggtatccgccgtttcgataaggcgctgattgataaaagcaattaagccaatgcctaatgccgcactggcgaggcttagcgccatcacactgataaatggccagcgatactgccgccagacaagtacaagaagttccatgcagaaaacccggacaatgaattacagcccgcagtttaaacatcttcgcgcgcacagcaataataattcttatttttattcttttttacctgcctgacggaatgtcaggttgtagcggcagtcgatggtgagtggatgaaaccccgctttcaacggttgaataccgtgataaaacagccgcgattcaccgccccataccaccacatcgccatgttccaacaacaaacgtttgagcggatcatttcgtttcaggccgccaaattgaaaaatcgcgggtaagcccagagaaacagaaacaattggcgcgcgcagatccggttcgtctttatcctgatgcagcgacagtttcgcgccaggagcgtagcggttgataagacaagcatctggctggaaatctggatagcccgccgccgtagccgcacgttgacataaattatgaaaactctgtggcatggcgggccacggtttatttgtttgcggatcaatgggcgaatagagataaccttgccgatgggtcgtccagcccagatgcccacagttggtcatcgccaccgacatggtatatcccccgggggtgaccatctggcgaaacggcgactggctggcaacgtcattaatatcgcggatcagttgctccgcagcgttaaaagcaaaacgccgtaaaattaccgcaccagccgccagtggctcttgccacggttcagcatcggcaaacagatccaacattacctctcctcattttcagcttcgcggcgcagcagttgcgctttacgcgacacgccccagcggtaaccggaaagtgtgccatcaccacggaccacccgatgacagggtattatgatagccagcttgttggcggcacaggcgctggcaacggcccgtaccgctttcggtttgccgatggcgttagccagttgctgataactgacggtttcaccgcaaggtatcgtgcgcagtgcctgccagacttgttgctgaaaagcagtgccgcgaatgtccagcggtaacgtcagcggcgtatcgcgttgattgaggctggcgatcacttcacgcacatgttgctgaaacatcagatcggcaggcgcgttgtcggcagcgggaaacatctgctgcaactcgctgattagtgtcgcgtcatcatcgcccagcaatatcgcgcaaatcccccgctcgctttctgccaccaggcaacgacccagctcacaatcagccagcgcgtaacgcaccgccagattttcgccaccgtgacggaattgtttagccgtcatgcccagcgtttcgtcagctttgcgatagtaactgctgctgtcggggaatccggcgttaagaatagacgtcgtcacgctctcccctttcgccagcgattcgcgcaaacggcgagcgcgccaggcctgttgccaggctttaggcgtcattccggtagtcgctttaaacaaccgatgtagatgaaatggactcatcgccacctggtcggctaaggcttccagcgttacaggcgtttcctgttccagcagtcgacacgcgtgggtgattttatccaaccgatgttgctgggcattggctttttctggctgacaacgtttgcaggggcgaaagccagcggcgagtgcctcgctggcatttgcgtagaaggagacgttttcccgcaaagcatgtctggcgcggcaagacggacggcaaaagatgcctgtggtacgcacggcgaaaacgaattcgccgtcggcattcgggtcgcgggctaagacagattgccagcgttgatcgtcagttaagcatgtggcttttttcataatcagctccctggttaaggatagcctttaggctgcccggtcaccatcacgcaaaaaccaacaatcttgcgctttaatttttttcgctgacaaggaagcttttaaactgtggtgacatccaggttttaaagctatcgccttctttggtgatcatataaaccgccagcccttcccggcgaacaacctctttagctttctccggcccgagtaccatcaagccagtatcccaggcatcggcttccagcgccgtcggagcaatcaccgtcacggataccagattgtgttcgatgggacgcccggtttgcggatcgataacatgggaaagacgtttgccgtccagttcgtaatagttacggtagctgccagaggtgctaatcccatgaccgttgatatccaccacagcctgaaccgcgttttctttatcggttggtttttgaatcgctacccgccacggcaggccttcaccgttcataccacggctgttcagcgcgccgcccaccgacaccagatagcgggaaatcccttcctgctccatcaagcgtgccaaatgatcggccgcatagccttcgccgacggtggagagatcgacatataaatccggcaggtctttttgcagatattgctgatgcgactgattgatgaccgtcaggtgctgtaagccggttttggctttcatcgcatcgatctgttcctggctcggaatttgaaccggctgttgttccgggccaaagccccacagattcaccagcggcccgacggttatatccatcgcgccatcggtcttcgcgccaatgcgcagcgaggtggtgacgatatcggccatcgcttcacttaccggccacggcgataaactttgcgagtcgttaaagcgcatcagcgcggaatcttttttataggtcgaaagcagctgatcgtcggcgtccagttgggtctgaatcttttctttaagttcggcgctgcgtttggcgtcaatgcccgggatgctggcacgccagaaggtacccatagttttgccttcaagaacggtaacttcagtagcgtgggttttggcgggttgtggtttttgatcgcaaccaacaaagaagagcgcggcagccagcagtgccacgcgggtaaagcttatttccatacgtgattatcctcatgcgaacggtcgcaagagtacaccaaaaaactgagtttgtacgctgaaaacaatgaaaaaagggcccgcaggccctttgttcgatatcaatcgagattagaactggtaaaccagacccagagctacgatgttatcagtgttgatgccagcgtcacgagtgaactggttgtcgtccagcaggttgattttgtagtcaacgtaggtggacatgtttttgttgaagtagtaggtagcaccaacatcaacatatttcaggatatcttcgtcgtcgtagccacgacccaggtttttacctttagactgcaggtaagccagggacggacgcagaccgaagtcgaactggtactgagcaacagcttcgaagttctgtgctttgttcgcccaacccagggaacctacgcgagttgcgttgtaggtctgggtgtactgagcagccaggtagatgttgttagcgtcgtatttcagaccaccagtgtaggtttcagcacggtcgccgttaccgatgtaagcagcggtgttctgagcatcagtacgtttggagctggagatcgcaccaccgataccgaaaccttcgtaatcataagtgatagaaccgccgacgccgtcgccgttttgacgcagtgcgtcacgaccgttgttagttacgccactagtaaagccttcaccagatgggttgccgtttttaccctggtactgaacagcaaagttcaggccgtcaaccagaccgaagaagtcagtgttacggtaggtcgcgaagccgttaccacgctgctgcatgaagttgtcagaaccgtaggtgtcaccaccgaattctggcagtacgtcggtccaggaagttacgtcataaacaacgccgtagttacgaccgtagtcgaaagaacccacatcctggaatttcagacctgcgaatgccacacgggtccaggagttgttttcgttttcagcgctgttgccctggatctgatattcccactggccgtaaccggtcagctggtcagtaacctgagtttcacctttgaagccaagacgcatgtaggtctggtcgccatctacatctttgttgtcagagaaatagtgcaggccgtctactttaccgtacagatctaatttgttgccgtctttgttgtaaacttcagcagcgtttgctgcgcctgctaccagcagagctgggaccaggagggacagtactttaactttcatgttattaaccctctgttatatgcctttatttgcttttttatgccactgcatactgattaaccctcattaatcagtcggcaagtccattctccccaaaaatgcagaataatccaacacgaatatgatactaaaacttttaagatgtttcatttatcgctatagatgtttcaaaatgtaaatgcaagggaactttttaagattattgcggaatggcgaaataagcacctaacatcaagcaataataattcaaggttaaaatcaataacttattcttaagtatttgacagcactgaatgtcaaaacaaaaccttcactcgcaactagaataactcccgctatcatcattaactttatttattaccgtcattcatttctgaatgtctgtttacccctatttcaaccggatgcctcgcattcggttttttttacccttctttacacacttttcattattctgtgctaccacagaaaaactataacgcttgttaactatttcacaaataattaacatccgcataatttccagcaatctttgtttatttgcaattatttttgttgggctttttgtaggttatttgtacagcaaaatggcgcttgtacatctatttcccccaatgcaggatgataaatatcacgggagaatagagaatcatcaatcaggtaagagtctggaatttcacactgtaccctttatactgccctatcacttcgcgaagttttaacaggtcataaacacgaatgcgtcagaaagagacaacggccacgacccgcttttcactcctaccggggagcattacccgcttctttttactgttgatcattgtgttactggtgacgatgggtgtaatggtacaaagcgccgttaacgcctggctgaaagataaaagttaccagattgtcgacattacccatgctatccaaaagcgcgtcgataactggcgttacgtgacctggcagatctacgacaacattgccgcgacgacctccccctcctccggcgaaggtttacaagagacgcgcctgaaacaggatgtctactatctggagaaaccacgccgcaaaacggaagcgttaatctttggctctcacgacaactcaacgcttgagatgactcagcggatgtccacttatctggatacattgtggggcgcagaaaatgtaccgtggtcgatgtattacctgaatggtcaggataacagtctggtgctgatctcaaccctaccccttaaagatctcacctccggatttaaagaatcgaccgtcagcgacattgttgattcacgtcgtgcagagatgttgcaacaggccaacgccctcgatgaacgcgaaagcttttctaacatgcgccgcctggcctggcagaacggtcattactttacattgcgtactacctttaaccagccaggacatctggcaacggtcgtggcttttgatctgccgattaatgatttgatcccaccgggtatgccgctggacagtttccgccttgagccagacgcgacggcaacgggaaacaatgataatgagaaagaagggacggatagcgtcagtatccactttaacagtacgaagattgaaatctcctcggcactcaactctaccgatatgcgcctggtctggcaggttccttatggcaccttattgctggatacgttgcaaaacattctgctgccactgctgctgaacatcggtttgctggcgctggcgttatttggctataccacattccgccatttctccagccgcagtacagaaaacgtccccagcacggcggtcaataacgaattgcgcattttacgggcaatcaatgaagagatagtctcactgctgccgctcggcctgctggttcacgatcaggaatcgaaccgcactgtcataagtaacaaaattgccgatcatttgctgccgcatttgaatctgcaaaacatcaccaccatggcggaacagcatcaggggattattcaggcgacgatcaataacgagctgtatgagatccgcatgttccgcagccaggtcgcgccgcgcacacaaattttcattattcgcgatcaggatcgcgaagtgctggtaaacaagaaactcaagcaggcgcagcgtctgtatgagaaaaaccagcaggggcggatgatctttatgaaaaacattggcgatgcgctgaaagaacccgcacagtccctggcggagagcgcggctaaactcaacgccccggaaagcaaacaactggcgaatcaggcagatgtgctggtgcggctggttgatgaaatacagttagcgaacatgcttgcggatgatagctggaaaagtgagacggtgctgttctccgtgcaggatttaattgatgaagttgtgccttcagtgttgcctgccatcaagcgtaaaggtctgcaactgctgattaacaatcatctgaaagcacacgatatgcgccgcggcgatcgcgatgccttacgacgtattttgctgctactgatgcaatatgccgtgacctcaacgcaattgggaaaaatcacccttgaggttgatcaggatgagtcctccgaagaccgcctgacgttccgcattctggacacgggagaaggcgtaagtattcatgaaatggataatttgcacttcccgtttatcaaccagacccaaaacgatcgctatggcaaggcggacccgctggcattctggctgagcgatcaactggcacgtaaactgggcggtcatttaaacatcaaaacgcgggatgggcttggtacacgctactctgtgcatatcaaaatgctcgcagctgacccggaagttgaagaggaagaagagcgtttactggatgatgtctgcgtaatggtggatgttacttcggcagaaattcggaatattgtcactcgccagttagaaaattggggtgcaacctgtatcacacccgatgaaagattaattagtcaagattatgatatctttttaacggataatccgtctaatcttactgcctctggcttgcttttaagcgatgatgagtctggcgtacgggaaattgggcctggtcaattgtgcgtcaacttcaatatgagcaacgctatgcaggaagcggtcttacaattaattgaagtgcaactggcgcaggaagaggtgacagaatcgcctctgggcggagatgaaaatgcgcaactccatgccagcggctattatgcgctctttgtagacacagtaccggatgatgttaagaggctgtatactgaagcagcaaccagtgactttgctgcgttagcccaaacggctcatcgtcttaaaggcgtatttgccatgctaaatctggtacccggcaagcagttatgtgaaacgctggaacatctgattcgtgagaaggatgttccaggaatagaaaaatacatcagcgacattgacagttatgtcaagagcttgctgtagcaaggtagcctattacatgaacaatatgaacgtaattattgccgatgaccatccgatagtcttgttcggtattcgcaaatcacttgagcaaattgagtgggtgaatgttgtcggcgaatttgaagactctacagcactgatcaacaacctgccgaaactggatgcgcatgtgttgattaccgatctctccatgcctggcgataagtacggcgatggcattaccttaatcaagtacatcaagcgccatttcccaagcctgtcgatcattgttctgactatgaacaacaacccggcgattcttagtgcggtattggatctggatatcgaagggatcgtgctgaaacaaggtgcaccgaccgatctgccgaaagctctcgccgcgctgcagaaagggaagaaatttaccccggaaagcgtttctcgcctgttggaaaaaatcagtgctggtggttacggtgacaagcgtctctcgccaaaagagagtgaagttctgcgcctgtttgcggaaggcttcctggtgaccgagatcgctaaaaagctgaaccgcagtattaaaaccatcagtagccagaagaaatctgcgatgatgaagctgggtgtcgagaacgatatcgccctgctgaattatctctcttcagtgaccttaagtccggcagataaagactaatcacctgtaggccagataagacgcgttagtgtcttatctggcatttgcaccgattgccggatgcggcgtaaacgccttatccggcctacgattcccattatttcaacaaattacattaaagtaggccagataagacgcgtcagcgtcgcatctggcatttgcactgaatgccggatgcggcgtaaacgccttatccgtcctacgaatcccgcgatttcctgaccctctcggcatataacgtcagcgtctgttttatcacatccagcgttaccggcttcgacaggcagctgtccataccggactccagacaccgctgcttctcttcagccaacgcattagcagttactccgattaccggcaacgtcagtcccaactgacgaatgcgttgcgtcaagcggtaaccatccatatttggcatgttgacgtcgctaagcacgatatcaatatgattcttgctaagtacattaagcgcatcgacgccatcattcgcggttttacattgatagcccaacgatcccaactgatctgccagcaaacgccggttaatcggatgatcatccacgaccagaatcatcatatcgtcattatcgctgaccgctttgtccgttgacggcagagcgttagcaggatcgtggatttgcccctatatttccagacatctgttatcacttaacccattacaagcccgctgccgcagatattcccgtggcgagcgataacccagcgcactatgcggatgccattcgttataatgctcgaacgcctctgcaaggttctttgctgccgttaacccgtctggtttgggcatgatactgatgtagtcacgctttatcgttttcacgaagctctctgctattccgttactctccggactccgcaccgccgtgttcttcggttcaagtcccaacatccgggcgaactggcgtgtttcattagcccggtagcatgaaccattatccgtcagccactccactggagacgacggaagatcgttgccgaagcggcgttccaccgctcccagcatgacgtcctgtactgtttcactgttgaagccgccggtagtgaccgcccagtgcagtgcctcacgatcacagcagtccagcgcgaacgtgacacgcagtctctctccgttatcacagcagaactcgaacccgtcagagcaccatcgctgattgctttctttcacggccactctgcctgtatgtgcccgtttcgatggcggtacagcaggttttcgctcaagcaacagcgcattctggcgcatgatccggtaaacacgtttggcattgatcgcaggcataccatcaagttctgcctgtctgcgaagcagcgcccatacccgacgataaccatacgttggcagctctccgataacatggtgtatacggagaagcacatccgtatcatcagtgtgacgactgcggcggccatccatccagtcatcggttcgtctgagaatgacgtgcaactgcgcacgcgacacccggagacaacggctgactaagcttactccccatccccgggcaataagggcgcgtgcgctatccacttttttgcccgtccatattcaacggcttctttgaggagttcattttccatcgttttcttgccgagcaggcgctggagttctttaatctgcttcatggcggcagcaagttcagaggcaggaacaacctgttctccggcggcgacagcagtaagacttccttcctggtattgcttacgccagagaaataactggctggctgctacaccatgttgccgggcaacgagggagaccgtcatccccggttcaaagctctgctgaacaattgcgatcttttcctgtgtggtacgccgtctgcgtttctccggccctaagacatcaatcatctgttctccaatgactagtctaaaaactagtattaagactatcacttatttaagtgatattggttgtctggagattcagggggccagtctagatcgtcgctctccatctcgatcaaataaatacgcgccaacaatgccggtagctcatgcggagcagccacactgtgtacccactcccctggcgctttctccagcggaataccaatatggcgacgacagaaggtcactaccgctctgccctgccattttttactcactacctcgtcagtgatcaacacatcttcgggagtcggttcctgcccttcgtatgttgtaacgacgatgccgctgcgctgcaaactggtttccaggaactgacagagcgacgcattgcggaccgccagccagcagcgtttaccactcaacccttccacgccttttttctgcgggtactgagcgccgtacaacggaatacgcacggtaaactggctgcccattcccggttctgaatctaccgagatatcgccgtccatcatgctgatcagtttttcacaaatcgccagacccagaccggtcccctggaaattacgctgtacgcccgttccgacctggaagaagggatcaaacaagcgcaccacttctttcgccggtatccccacgccggtatcgcgaacacggatagagagataatcgccatccgcgcgaacatgcaaaactatacagccggtatcggtgaattttatggcgttactcaacaggttggagatgacctgctgtaaacgcatcgggtcgccatttaaggccactggcacatccggttcaataaagcagtacaagcctaactgcttgcgtaccaccagcggtaaatagttggcggtgatgtggttcatcacttcacgcggtgaaaactcacgcggttcgatcttcaactgttccgattcaatcttcgagaaatcgagaatatcgctgataattttcaacaacaggctggaagagttgttcattgccgtcaccagccgatcgacgcctttcggtaactctttggtttgcaacagatccaggttaccgataatgccatacagcggcgttcgcagctcatgactgacggtggcaaggaacatcgattttgactggctcgcctgttccgctgcttgtgccatctcctgcaacgactcttccatcttcacgcgcgaagaaacatccaccagcacacaaatggccacgttttcattacgatagcgcgaatggacgaagctgatttgcagattggtattgttgctggtcaggacatcaacaaaattgacctgctgcccacagataatttgcgtcagtcgttggcggtcctcatgcgtaagcatattgagataggtatgcgccagttcgttacttaaaatattgacgccatcagcggtacgcaaaatgcagatacccactggcgcggaggcgacaatcttgcgattgaactgctcatgttcttccagtcgcagggcgtcgctttccgccggaatgaaaatacgtcgctcgtacatccgtgcgagagtaaacaatgcagctccggcaagcacattcagcaaaattgcgttaaggatcaacatgcgaatgcgttccagcaccttatcaaccggcaccgaatacacgatgcttagcgatgagggtggcagatttttcttcagcaccagctcccggaacccttccgtatagccaaaccaggagcgttcctgcatccagcgaggatcgcccttaattttactttctggtccggtaagcgaaatcagggtatgaccattttcatcaagaatggtaacccccatcggcaacgtacccggtaagaaaaagttctccatccggatggtctgctcgacacccaaaagcgcctgcaaccggttcgccagataaactggcgtcaacgcgtaaaaatacccgacgccagggcgcggaccttcgctgatccagtagaggttactgccgctatcatcttgtggtgcatttcgatatttattgatgcgttcatgcaaagctttcaacgcggtatcgcgttccactggcatatcacgcagaccgaaattggccatgcagaggttatcgctgccgattaaaaatacccggtttagatcgtaagccgcagaaaaattatcgcgccagtagcgcataaaccacgccaatgactccagagaacctcgccaggtgttactcattgcggaacaatcggagtcggcaaacagcggttcaaacgcaggcacatccgcctgcgtttctcgtccacgcggggaaagcacaccgttttctgccgataagcgattttcggcgatgtacttcagctctttcatcacatcagaggtgcgttgaataaagcgctgagcctgatcggaactcagattaaattcctgacgaatttccgattctcgctgatgtaacgcattaacgatgtaaaaaacggatgaaaaagcaatcaacagccagagcactaacgccaatgctctgaacatgtagcgcgaggctttcagggttgtacgaaaagaagcaaggtatttcaaaggggcgaagctccgcctcaggtgaccgatggagtgtggttaaggtagcggtaaaagcgtgttaccgcaatgttctctcttctctggaatatgatacaccgccgagaaatcatcaccttaacctctgataatcgtcatataccggacaagactagtggatttcagcatgcattatatgaagtggatttatccacgccgcttacgcaatcaaatgatcctgatggcaatcctgatggtcattgtcccaacgcttactattggttatatcgtagaaacggaaggacgttcagcagtcttatctgaaaaagagaaaaaactttctgccgtggtcaacctgcttaatcaggcactaggcgatcgctatgatctctacatcgacttaccacgtgaggagcgtatccgcgcattaaatgcagaacttgcccccattaccgaaaatatcactcacgccttccctggcatcggtgctggttattacaacaaaatgctggatgcgataatcacctacgcgccttcagcgctatatcagaataatgtcggcgttaccattgccgcagatcaccctggtcgcgaagtgatgcgtacaaatacccctttagtttattcaggcaggcaggtgcgcggcgatattttgaattcaatgctccccattgagcgtaatggtgaaatcctcggctatatctgggccaatgaattaaccgaagatattcgccgccaggcctggaaaatggatgtgaggattatcattgtgctcaccgctggtttgctgataagcctgctgttgattgtccttttctcccgtcgcctgagcgccaatattgatatcatcaccgatggcctctcgactctggcacaaaatattcccactcgattaccacaattgcccggtgaaatggggcaaatcagtcagagtgttaataacctcgcccaggcactgcgtgaaacgcggacacttaacgatctgattattgaaaacgctgccgatggcgtcattgccattgaccgccagggtgatgtaaccaccatgaacccagcagcagaagttatcactggctatcaacgccatgaactggtagggcagccttactccatgttgttcgacaatactcagttctacagtccagtactggatacgctggaacatggcaccgaacatgtggcgctggagatcagttttccaggtcgtgaccgcaccattgaactcagtgtcactaccagtcgtattcataacacgcacggtgaaatgataggtgctttggtgattttctctgatttaactgcccgcaaagaaacccagcgccgcatggcgcaagcagaacgcctcgccacactgggtgagctgatggctggcgtcgcgcatgaagtacgtaatccgttaacggctattcgtggttatgtacagatcttgcgccaacaaaccagtgacccaatacatcaggaatatctgtccgtagtactcaaagaaatcgattcaattaacaaagttattcagcaattgctcgaattttcacgtccacgccacagtcaatggcaacaagtcagcctcaatgcattggttgaagaaactctggtactggtacaaaccgccggcgtacaagcgcgggtcgacttcataagcgaactggataatgaattaagcccgattaacgccgatcgtgaactgctcaaacaggtactactgaatatcctgatcaatgccgtccaggctatcagcgcacgagggaaaattcgcattcaaacctggcaatacagcgactcacaacaggccatttcgatagaggacaacggctgtggcattgatctctcgctgcaaaaaaagatcttcgatccctttttcaccaccaaagcctcaggaaccgggcttggtctggcgttaagtcaacgcatcattaatgcccatcagggtgatattcgcgtcgccagtttgccgggctacggcgcaaccttcacgcttattttaccgatcaacccgcagggaaatcagactgtatgactgctattaatcgcatccttattgtggatgatgaagataatgttcgccgtatgctgagcaccgcttttgcactacaaggattcgaaacacattgtgcgaacaacggacgcacagcattacacctgtttgccgatattcaccctgatgtggtgttgatggatatccgcatgccagagatggacggcatcaaggcactaaaggagatgcgcagccatgagacccggacacccgttattctgatgacggcctatgcggaagtggaaaccgccgtcgaagcgctacgctgcggagccttcgactatgttattaaaccgtttgatctcgatgagttgaatttaatcgttcagcgcgctttacaactccagtcaatgaaaaaagagatccgtcatctgcaccaggcactgagcaccagctggcaatgggggcacattctcaccaacagcccggcgatgatggacatctgcaaagacaccgccaaaattgccctttctcaggccagcgtcttgattagcggtgaaagcggcaccgggaaagagttgattgccagagcgattcactacaattcgcggcgggcaaaggggccgttcattaaagtcaactgcgcggcgctgccggaatcgttgctcgaaagtgaactgtttggtcatgaaaaaggtgcatttactggtgcacaaaccttgcgtcagggattatttgaacgagccaacgaaggtactctgctcctcgacgaaattggcgaaatgccgctggtactacaagccaaattactacgcattctacaggaacgggaatttgaacggattggcggccatcagaccataaaagttgatatccgcatcattgctgccaccaaccgcgacttgcaggcaatggtaaaagaaggcaccttccgtgaagatctcttttatcgccttaacgttattcatttaatactgccgcctctgcgcgatcgccgggaagatatttccctgttagctaatcactttttgcaaaaattcagtagtgagaatcagcgcgatattatcgacatcgatccgatggcaatgtcactgcttaccgcctggtcatggccgggaaatattcgagagctttccaacgttattgaacgcgccgtcgtgatgaattcaggcccgatcattttttctgaggatcttccgccacagattcgtcagccagtctgtaatgctggcgaggtaaaaacagcccctgtcggtgagcgtaatttaaaagaggaaattaaacgcgtcgaaaaacgcatcattatggaagtgctggaacaacaagaaggaaaccgaacccgcactgctttaatgctgggcatcagtcgccgtgcattgatgtataaactccaggaatacggtatcgatccggcggatgtataacaccaaaacttgctatgcagaaatttgcacagtgcgcaattttctgcatagccgctcattctccttataaatccccatccaatttatcccttcatattcaattagttaaataactaaatccaataatctcattctggcactccccttgctattgcctgactgtacccacaacggtgtatgcaagagggataaaaaatgaaaacaaaattgatgacattacaagacgccaccggcttctttcgtgacggcatgaccatcatggtgggcggatttatggggattggcactccatcccgcctggttgaagcattactggaatctggtgttcgcgacctgacattgatagccaatgataccgcgtttgttgataccggcatcggtccgctcatcgtcaatggtcgagtccgcaaagtgattgcttcacatatcggcaccaacccggaaacaggtcggcgcatgatatctggtgagatggacgtcgttctggtgccgcaaggtacgctaatcgagcaaattcgctgtggtggagctggacttggtggttttctcaccccaacgggtgtcggcaccgtcgtagaggaaggcaaacagacactgacactcgacggtaaaacctggctgctcgaacgcccactgcgcgccgacctggcgctaattcgcgctcatcgttgcgacacacttggcaacctgacctatcaacttagcgcccgcaactttaaccccctgatagcccttgcggctgatatcacgctggtagagccagatgaactggtcgaaaccggcgagctgcaacctgaccatattgtcacccctggtgccgttatcgaccacatcatcgtttcacaggagagcaaataatggatgcgaaacaacgtattgcgcgccgtgtggcgcaagagcttcgtgatggtgacatcgttaacttagggatcggtttacccacaatggtcgccaattatttaccggagggtattcatatcactctgcaatcggaaaacggcttcctcggtttaggcccggtcacgacagcgcatccagatctggtgaacgctggcgggcaaccgtgcggtgttttacccggtgcagccatgtttgatagcgccatgtcatttgcgctaatccgtggcggtcatattgatgcctgcgtgctcggcggtttgcaagtagacgaagaagcaaacctcgcgaactgggtagtgcctgggaaaatggtgcccggtatgggtggcgcgatggatctggtgaccgggtcgcgcaaagtgatcatcgccatggaacattgcgccaaagatggttcagcaaaaattttgcgccgctgcaccatgccactcactgcgcaacatgcggtgcatatgctggttactgaactggctgtctttcgttttattgacggcaaaatgtggctcaccgaaattgccgacgggtgtgatttagccaccgtgcgtgccaaaacagaagctcggtttgaagtcgccgccgatctgaatacgcaacggggtgatttatgattggtcgcatatcgcgttttatgacgcgttttgtcagccggtggcttcccgatccactgatctttgccatgttgctgacattgctaacattcgtgatcgcgctttggttaacaccacaaacgccgatcagcatggtgaaaatgtggggtgacggtttctggaacttgctggcgtttggtatgcagatggcgcttatcatcgttaccggtcatgcccttgccagctctgctccggtgaaaagtttgctgcgtactgccgcctccgccgcaaagacgcccgtacagggcgtcatgctggtcactttcttcggttcagtcgcttgtgtcatcaactggggatttggtttggttgtcggcgcaatgtttgcccgtgaagtcgcccggcgagtccccggttctgattatccgttgctcattgcctgcgcctacattggttttctcacctggggtggcggcttctctggatcaatgcctctgttggctgcaacaccgggcaacccggttgagcatatcgccgggctgatcccggtgggcgatactctgttcagtggttttaacattttcatcactgtggcgttgattgtggtgatgccatttatcacccgcatgatgatgccaaaaccgtctgacgtggtgagtatcgatccaaaactactcatggaagaggctgattttcaaaagcagctaccgaaagatgccccaccatccgagcgactggaagaaagccgcattctgacgttgatcatcggcgcactcggtatcgcttaccttgcgatgtacttcagcgaacatggcttcaacatcaccatcaataccgtcaacctgatgtttatgattgcgggtctgctgctacataaaacgccaatggcttatatgcgtgctatcagcgcggcagcacgcagtactgccggtattctggtgcaattccccttctacgctgggatccaactgatgatggagcattccggtctgggcggactcattaccgaattcttcatcaatgttgcgaacaaagacaccttcccggtaatgaccttttttagttctgcactgattaacttcgccgttccgtctggcggcggtcactgggttattcagggacctttcgtgatacccgcagcccaggcgctgggcgctgatctcggtaaatcggtaatggcgatcgcctacggcgagcaatggatgaacatggcacaaccattctgggcgctgccagcactggcaatcgccggactcggtgtccgcgacatcatgggctactgcatcactgccctgctcttctccggtgtcattttcgtcattggtttaacgctgttctgacggcacccctacaaacagaaggaatataaaatgaaaaattgtgtcatcgtcagtgcggtacgtactgctatcggtagttttaacggttcactcgcttccaccagcgccatcgacctgggggcgacagtaattaaagccgccattgaacgtgcaaaaatcgattcacaacacgttgatgaagtgattatgggtaacgtgttacaagccgggctggggcaaaatccggcgcgtcaggcactgttaaaaagcgggctggcagaaacggtgtgcggattcacggtcaataaagtatgtggttcgggtcttaaaagtgtggcgcttgccgcccaggccattcaggcaggtcaggcgcagagcattgtggcggggggtatggaaaatatgagtttagccccctacttactcgatgcaaaagcacgctctggttatcgtcttggagacggacaggtttatgacgtaatcctgcgcgatggcctgatgtgcgccacccatggttatcatatggggattaccgccgaaaacgtggctaaagagtacggaattacccgtgaaatgcaggatgaactggcgctacattcacagcgtaaagcggcagccgcaattgagtccggtgcttttacagccgaaatcgtcccggtaaatgttgtcactcgaaagaaaaccttcgtcttcagtcaagacgaattcccgaaagcgaattcaacggctgaagcgttaggtgcattgcgcccggccttcgataaagcaggaacagtcaccgctgggaacgcgtctggtattaacgacggtgctgccgctctggtgattatggaagaatctgcggcgctggcagcaggccttacccccctggctcgcattaaaagttatgccagcggtggcgtgccccccgcattgatgggtatggggccagtacctgccacgcaaaaagcgttacaactggcggggctgcaactggcggatattgatctcattgaggctaatgaagcatttgctgcacagttccttgccgttgggaaaaacctgggctttgattctgagaaagtgaatgtcaacggcggggccatcgcgctcgggcatcctatcggtgccagtggtgctcgtattctggtcacactattacatgccatgcaggcacgcgataaaacgctggggctggcaacactgtgcattggcggcggtcagggaattgcgatggtgattgaacggttgaattaatcaataaaaacacccgatagcgaaagttatcgggtgttttcttgaacatcgacggcgaaggtaaccccattaatcaccagtcaaaacttttcaccagcgtcagctcgccagcattacgcatcggtacaataaatgtttcctgtttctcattgaccgatccttcatcggtgatcagcgtcagttgggcggtggttaattccgtttcgctgcgcccaccatagtagttgatatacacctgatagcgcccgtgaattggcgcgggcatggcgaaaatctcgggtccgtaccccgtcgtgacatccatatccagtgcaccactgtttttcagcacggtgttaccgtaccaggcgtgttcgccatcgggcgtaacaacgtgaaggtcgaggtcggtattgtccgtatcccacgagagaaccagccgtaaacgtgcacgaatcgttcctgtacccggcgttgagtaaaactgcattttttgtcggctttgcccatccgggctgatgacctgcacgctgttgctgccttcagtgaaaatataagggcgtgcaaatgaaccatcggattcaattctctgcggcatactggcaccgttgaccaccagccggccctgctgaactttacccgccgcagcataattctttattttgccgcggatctgcgctgagatattttgatcatctgccatgttgacggacgacgccgggtaattgatcgattgtgaaaaactggcatcttcgccctctgccggatgccagcctgagagcggtgcatcaatctcgacttcctgcacaccttcactgtgagcgacaggcgaaagcgccaccagtaacaacggaagaaaaatctttcgcatagcattagtccattaataattgtcgggtcagcgtttcgatatagttctcatcaagcccggtgggataaccatcaaaggccaggtgcagatactcatgggttaaatccagccgatcctgaagcgtaaagaagttacgaataaacagccgtttctgctgccgatcggtataggggaaacctgagactaaacggcaaaccgcaaacacgtctggttcgttgtaccccgtctcagcttgtaatatacgccgccactgcggcatttttttcgccagccaggctttcgctttgggtaataactggcaggttgagcgtggcgctccccagcggctaagactgttgtcgggataagcaaacgcgagtatctgatcgtaacgctctccctgccccgcctgggccgtggcttgccgccaggaaagtgtcccttcggtagcgcgactgccatgataatgaaccggatcgcctgcatagatgagatcctgcgtccaggcggtcatcgttcgcgcccccgtggtcgctggcgaagcagaaacacgctgcgtggcgctgctgtcggggatggtcaggcaatcgccttcccgattggcgttttgctgtaaaaaagtgcgaatcgccacggtcatggctttcgctgcctcagggggcgtacttttcgcctcgcgatccagaactctggcaacgtactcttcacgatcgagatgcgactgcaatttcagtttgcccttttcgctcagtaaggtcgtctcaccgtggctgacaaacgtaatgtggttaccattagtaaacgtcacacgatagcgcccattaagtacgccgggatttactgccgtcgtactcttttccgctgtgattttcttcagcggatagcgggcaaacagctccacctctacacattgcccactggcaacctgcgtcggcactggcaaaacccgattaagcaccgtcgcataacgggttagtaccgttttgctggtgccactgccagtaacccacagcggtgtaccatcggttaaccagccagcaaaaccaccctgacggatttcctgtttatcatcggcaaaccagctccaggttttcacccgtacccgactaccgagcatggatgcgacaccgattttcgcctcgtccagcaccacatccagtaagacttcctgagctttgttttgcgcgggtaacgtcgctaatgaatcaagcagcgatttaaccgttaccgaggtttctggcttcagcgtagtcagagacgctaaccacgcaggtgcctgacgctgttgccagtattgcccccacacatctgcgccaatatgcaaccgctgcggcgcaaaatagagcccacaggaacgtaccagcgcggtatcgcgcgttatgctctccccagcctgacaacaataaacctcttccggggagtttccgcgacactggtagggctgctccggttgatgggtatcctccagccaggcgtaaacatacagtttccacaaactccctaacggcgtggtgagcgagtcaggtaatgctgagactttggtcacgcctgatgacgacagctgatacagttgatcgtgctgcgcaccgcgcagcaccagttgtaacggcgtctcctccgcaagtgttggcagagtaaccaacgccaatagccagacgattctgcgccagttcacttatttcacctgcatcccggtccattcactccctgccgcaacactttgctgcgcaggtgcataggaacgcacataacgagcaggaggcagaacgaattgccctttttgcgagaagcgcagcaaatggcggaaagtgaccgttcccgtcagttctttcaccggcaccatataggccagttcgcccatttcatttcgcgctttttccagcaattgcccctgctgtttcgcggcgttgggtttattgaccgaaatgccccatgttgtgcgctcaacgtcggctcccggtggcagcggtacttccacctgaccgtagcgcagaactgcatcctgctcgctggtaagcgtgatttcatcgagatacagcgcatcgctgtcaatctcattgctggtcaccggttgcagaataaagctcatctcttcttcaccagggataagccgatacaactggcgttcaacggtcaccggaatgttactttgttgagccatttttgccggctcacgtcagcggacctgcacattttgcggcgataattcgtcaccaaaagagagaatgtccggcacgccctgaccaacccaacgccagtcttcgccccctccagttaacttatgtttagcccatgcgcccgcaggcgcaggcaaaacaactggaggcattgtcgccatatatttcgccagccagttcatggccagcgcgcgctcaatagtggattgctcagcggtcaaaccacttaaaatagcggccgtctgggtagcgtcgccaccgctattaagcagcacaaccgtgtgcgccagcggctgattgctgtttgccgctttatcccacgcatattgctgaacctgtggcatcaccgtggacttcaactgcgcttttttcagcaacgtcatggttaagacgtttgccaccgcatctgccagtggagactccggtgtatcgaggatcaggctatcattgatatcgcgggtgtcttcctcagagaaatcttcagttttagttccgcgccgggcgatagcttcatccaaccctttcaacaacgttttgcacggcaaattcatctcctgcgcccatgccagcaccagcgcccgatgcaataacggcatgttatctgcctgctccgcgtagctgtcgagcatatgctgccagtattccggttgttgcgttacgccgatcgcctggctggcctgccagtcggcgtaccatgcccatgccgtaaggaaggcgtcaccattgccatcttcaccccaccaggtaaagcgcgctccgggccccgccagttgcatcagccgcagacggttatcctgaatcatctgacgaatgtcgttagcggcggcactttgatgatcggcaagcgaacgccaggcgagactgagcgggatcagacggctaccggtgttgattacgccaccccacggttcatcgactaacgcatcaagattgttgcggaaaatctcctgcggcgtttcactactttgtagccggatattgctcgcctgctcgggcaacatcagcgcgttatcgccaccaccgagcatgacatttttctgctgttcaacgggccagctgttatccacaaaagacagttttgtgctaatgctgtcctgcacttgcccattttgttgcagttctgcacttaacaagccagattgctgaatattctgcgtcagcgaaatataattcgcccctttgtgcagcgtcagcgtctggcgcatctcagcgcctgcaaatttagtcaccagcgccaccggttcgttatcctgctgactgaagataaacagtcctgccgccggtttgtcgcccacgcgatacaccgttggcatactccacttcatgtagagatttttttccgaacgcagataagcacgcccctgcccgaccagcccgtcgccgttcatcccacgcgcggtgatacgccagcgggttaacgaatcaggcatcaggaacgtgaaatacgctttgccttgtttatcggttgtgagtgacggcatccatgccgcggtatccacctcttcacgccgtggacgttcaagcatttttactcgccgctcgctgcggttagttgcgccaggcgcaaccggctcgctggagagcgcctggtcgtagctgataaacgacagactggagctggtacgcacattgttacgccccagcggatagaaaaatttgccgatattcggcgcgatttctggttgcagcgcgtagatcatttcatcgaccacgcctaccgttagctgcgcagaaacaggtttacctttcagcgacgaggttaattcgacattgaccagttcaccaggctggtaatgggttttgtccgttttcacccggatatccagctggggaacggcaactttgatcccggcgttctgaaaactgtactgaccgttacgggtatacagcaccgaaaaagtgatgttaggcgcaaaggaattgctcactggaacccgggcttcatactgggtatcgtttaaacgttgtagcgttagccagtttgccggatgcgaaagcagcgactgctgttccacgcgatcgcgttccagcgtcaataatgcttcatcaattggctccggaaaggtaatcagcatcttcgcggtttcgcctggctggtacagcgttttatccgccacgatatctaccgtaccagtatgcgccgtgctgcccttaccgctgacggcatgacttaacccagcgagaattaagccgtctttatcgcgtaatgtcagattgtagttgccaggtttagcgaaattgacggtaaaggatttgccgcctgacggtagctctccgctatggctcgtgcggtcttcgagacgcaaccattcatacgtaacaggaacctgttttgaagattccagcgcggcataacggaacacaaccgactcgccgctattactgtattgtgcggcagtacttaatgagtaatgcgccagaccgcgttcaatgaggatctctttggtggtggtgacgcgatacgccgcgccgtcactggcggagacggttaacaaatagcggctcggtttatcggcggcggggagatttaacgccacatgaccgctggcgtcggacaccgtttcgctgccttccagcgacacggggaaacgtccggcataacgcaaatcgttaccgaccattgataattgctgagcgcgcaaacttaactgcacgcgggcattttttaccggctcgccatccgggtagagcagttgcagtttgccgctgaccgcttcgccagttttgaactcttttttggcgagagctaaaccaatctcgaaatgtggcttgatgtagtttgccacgcgaaaactgctgctatagacctgattgcggtaagcaagacgtaactcataacctccggctacggcattttctggcaggcggaaacttccctgcccgccattgcgcgcatccagcgtgacattgacggtttgcaacagactgccgttggcgtccagcaccgaaagcttcgccggggcgctgacgatgggggatgaatgcaacggatcgtggaactcgcggccgatcactttaacatcgacacgatcgcctgcgcgatatagcgggcgatcggtaaaaatatacaagcgggtgttgtagatttcgctttcgtagaagaagttctcggagacaaaaacgccgccttcagcatccttacccagaatgtatgaacgttctggcgatatatgttgtaactgcaaggtaccgctgtcatcggtcacaccgcgggtcatcacgccaagaccgtcagtccacaagatctctgagccgggcttcgcttcaccctgttttttacccgcggtccacaccagaagctctttgcctgacactttgctaagcgccacggtatcggaaacaaacaccaccgtcgtcgcccgatacccaccaaccatcgcctcgacgaggtacagtcccggctcttgttggccgagaggaatataaatgttacccggctgcggcgagatgaaattgctggatgcgccttccagttttaccccttgctgcggctcgaacggtttagcctgccatagtggataacggaactgtttcaccaggggatattttttcagcggggaaaactggttgttctgtacataacgggaaggtttaataatggcattgccgagctgtaattcgggtaacgcctgagtcacattctgccgtgactgagaagagaaagtacgctgcatcacgcggcgagatttgccgtaccagttatcccacagccaggttagcgtattgttcagcccgtcgcccagatattgcggttgcaccacaatgcgatgcaggtttttctgctggcgcaaaaatgccatcgggtcaggaatacgatacaggcgaacgtccacgccgccgtactcttccatctgatagcgccgataatcacgccccggcgcttccagtcgcactttcgcctcttcactgctgctaaaactgctgtcagcaagcaaaaagaatgttcccccggcaggcggcgcatagttgctggaaggaagcgaatcatcagcattagcaagccctgttcccacaagagacagggacaagcacgctgctatcgcgccagaaaatttaaacgataaatgccaatgaaattgggattggaatcgttgggtatccatcgggtgtccttccatgtcataagttgttgcagactgactgcgcgcattccgttgtcagttttcgtggcgcttccggtgtggtagatgacgtaacgccccatccagaccattaagtgctgggcatcgccctgatcgaaaaaaatcatatcgccaggcagcgcctggtttatgtcctggccaataaactggctgttgtactgaatcaaattaatcgcggtcacataggggccggttttcccgttcccctgattccagttttgcgccagttgacgctgttcaggtgttagcgtcatctctggcggcaaatactggctagataaaccgttactttttagccatttactgtcgtgaactttcagcgtctcgttcgccgcaaatcgcaccaggcccgcacaatcctgctgataccagcgtggacttggcccctggcggagctgttcttgtgcaatgcgtacaaaccaggcgcgaaacagcccggattgttcgacattcagcatttcgctatgggcaacaacacaacacagccagcaaatcagcgccagcagcccgtgcctcatagcggctgccaggttatgggtagccactgccaggcggcaccgggttccatctgggccagcttcatgacataacgcggttgttgagataaagcgtccagcttcggcattaataaagtttgtgcggcgttataaaaaaccggttcgagattcttcggcagactggtcaacgtttcgttacgcagcagtttcgctattccttgtggattgatatagagcggaacgatgccatcagtgggtattacatccaccattgccgggcgggttttattcagtgtttgcagcgcgttattaaccagcgtgtcatcgagggagaaaagcagcgttttgttttgcatcgccagcgacacacggaaaaaataatccgacattaattgatcgggttgcgccgcctgcgctttcggatactggccgtatcgggaactcacttcgcgacgccagatttgcgcttcgccctgctgagtctggcttaccggcaaaacaccttctggcgctttgctttcgtgcgcaccaatattttgcgtaaacagtttccctggcaattgcgcctgttcggcagtgccatcaaactgaccgacaaacagcggggtttgcaattttgagtcttcataccagcacagccccgcggcaccgtctaacgccccattcagcttgtcgttttcctggctgatgtgcgaaagcatctcttcggcaataccgtgtgaatacggcaccgccacacagaagctggctccggcaggcatactgttccataccggcgtaaaatcgaaactggcatctacgctggcggattcatcatttaacgccacaaaactgtgccagccgtcgttacccatttcgaagcgtacgccagcaaaagaaggcattaaccgctggtagccaaaccccagccacctggcgctgactacgatgcgctggcgtactggcgttttttcggcagtacgctcttccaggccaaagcttgcttgccagcgttttttgccgctcaacaaatcacctgcgatcgccgtggcttcggtatcctgctgatcatctttaaacaacatatccgtgctggaaaacaccagcatcttgtcctgataagtcgcgaacatcagggcgttattgccgttatagcgcaactgataaacaggaacagtttcactatttatcttgatgctactgatttccgttttgcttaactggctgtcgctggtagcggcaaacaacaatggctccagcagtttgcttaaaccactgcgctggatcagcaccatataatgtgaaagatggccttgtttatcgtgccacagcgctgcctgcgcgggctgatctaagagtgacgaaaagagcttatctttcagcgtgagatcgtgttcatagacaatacgacgaatgctgccttcaatgcccagacgatcggcatgattctgataatagaaaacgaaatcttcgctcagaacatcgtggagaaacggaatggtgaggagatctttgggaagctggctcagagagtcgctgtcgagaaagaggtccggctcattgagatcgatttgcagattgttgtgcaccaccagcggcgacaacgttttttctggcccactgccagcatattgcaacgcccagacgccagcggaaagcagtgctattgcgccaaaacctacaagaccatagaaccgccagcctttcgcctttttttcaccactcattgccacattccttgtgtatagccagccattttttacgggcacagccaaactttaccgtgccctaatacgacaaaagcccagactttgcagcctggacttttcaattcaaacaagggagatagctcccttttggcatgaagaagtaaaattattcttcttctggctcgtcgtcaacgtccacttccggagcgatttcatcgtccccttccgcggcactgccgtcgatggtatccagatcttcctcgtcaaccggttcagcaacacgttgcagacccactacgttttcatcttccgcagtacggatgaggatcacgccctgggtgttacggcccacgatgctgatttccgaaacgcgagtacgtaccagcgtaccggcatcggtgatcatcatgatctggtcgcagtcatctacctgtaccgcgccaacaactaaaccgttacgttcggtaaccttgatggagataacccctttcgtcgcacgcgacttggttgggtattccgccactgcggtacgtttaccgtaaccgttttgcgttgcggtgaggattgcgccatcgccacgaggcacgatcagagagacgactttatcgccttcacctaagcgaataccgcgaacaccggtggtgttgcagcccatcgcacggacagaagactctttaaagcgcaccactttaccttcagcggagaacagcattacttcgtcttcgccgctggtcaggtcaacgccgatcagctcatcgccgtcaaccagtttgatcgccactttaccggcggtacgcagacggttgaactcggtgaggacagttttcttcacggtaccgttagcggtcgccatgaagactttcacgccttcttcaaactcggtcactggcaggatcgcagtgatacgttcgtcctgctccagcggcagcaggttgacgatcggacgaccgcgcgcgccacgagtggcttccggcaactgataaactttcatcgaatagacgcgaccacggctggagaagcacagaatatggtcgtgagtgttcgccaccagcagtcggtcgataaagtcttcttctttaatacgtgcggcagatttacctttcccgccacgacgctgcgcttcgtattcagaaagcggctgatacttaacgtagccctggtgagagagcgtcacgaccacatcttcctgggtgatcagatcttccaggttgatgtctgcgctgttggcggtgatttcagtacgacgtttgtcaccgaactgttcacgaaccagctccagctcttcacggatcacttccatcagacgatcggcgctaccaagaatacgcaacagttccgcgatctgatccagcagctctttgtattcgtcgagcagtttttcgtgctcaagaccggtcagtttctgcaaacgcagatccagaatcgcctgagcttgctgttcggtcaggtagtacagaccatcacgcacgccgaactctggctccagccattccggacgcgcagcatcgtcgccagcacgttcgagcatcgcggcaacgttgcccagctgccacggattagcaaccagcgcagttttcgcttctgcaggcgtcggcgcatgacggatcagttcgatgatcgggtcgatgttcgccagcgccacggctaatgcttcaaggatatgagcacgatcgcgagctttacgcagttcgaaaatagtacgacgggtcaccacttcacggcggtgacgaacaaacgccgcgatgatgtctttcaggttcatgatcttcggctgaccatggtgcaatgccaccatgttgataccgaaagaaacctgcaactgggtctgggagtagaggttgttgagcacaacttcaccgaccgcatcgcgtttcacttcaatcacgatgcgcataccgtctttgtcagactcgtcacgcagcgcgctgatgccttccacgcgtttttcttttaccagttccgcaatcttctcgatcaggcgcgctttgtttacctgatacggaatttcgtggacgataatggtttcacgaccggttttggcgtcaacttccacttctgcgcgagcgcggatatacaccttgccgcgaccggtacggtaagcttcttcaataccgcgacgaccgttaatgattgccgccgtcgggaagtccggccccgggatgtgttccatcagcccttcaatgctgatgtcttcatcatcaatatacgccagacaaccgttgatgacttccgtcaggttgtgcggcgggatgttggttgccatacctacggcgataccggaagaaccgttcaccagcaggttaggaattttggttggcatgacgtccggaattttttccgtgccgtcatagttatcaacgaaatcgaccgtctctttttcgagatcggccatcagttcatgggcaattttcgccagacggatttccgtataacgcattgccgccgcagagtcgccgtcgatagaaccgaagttaccctgaccgtctaccagcatataacgcagcgagaatggctgcgccatgcggacgatcgtgtcatagaccgccgagtcaccatggggatggtatttaccgattacgtcaccaacgacacgggcagattttttataggctttgttccagtcattgcctagtacgttcatggcgtaaagtacgcgacggtgtaccggcttcaggccatctcggacatctggcagcgcacggccaacaatgaccgacatcgcataatccagataggagctcttcagctcttcctcaatgttgaccggtgtaatttctctcgcaaggtcgctcatctaaccgctatccctctactgtatcccggattcaaaggtcgcaaattataacacagccgcgcagtttgaggtaaacctatacgctttattcacatccaatgcctgatatactcgtttgtcttgccaattacggagtagaagtgccaatgaatgccgaaaaatcgccggtaaaccataacgtagaccacgaagagatcgctaaatttgaagccgtcgcctcccgctggtgggatctggaaggtgagttcaaaccgctgcaccgcattaacccgctgcgtctgggctatattgccgagcgtgctggcggtttatttggcaaaaaggtgctcgatgtcggttgtggcggcggcattctggccgagagtatggcgcgcgaaggcgcgacggtgaccggtctggatatgggctttgagccattgcaggtggcaaaactgcacgcactggaaagcggcattcaggtggattacgtgcaggaaaccgtggaagagcacgcggcaaaacatgccgggcagtatgatgtggtgacctgcatggagatgctggagcacgtccccgatccgcagtcagtggtcagagcctgtgcgcaactggtgaaaccaggcggcgatgtctttttctcgacacttaaccgcaacggcaagtcatggctgatggcggtggttggtgcggaatatattttgcgcatggtgcccaaaggcacgcatgatgtgaagaagtttattaaaccggcagaattgctgggctgggtggatcagaccagtttaaaagagcggcatatcactgggctgcattacaacccgatcactaatacttttaaactcggccccggcgtggatgtgaactatatgctgcacacgcagaataagtgaggttgatgtttggccgcgccaatgcctgatgcgacgcttgccgcgtcttatcaggcctacaaatgctccccgtaggccggataaggcgtttacgccgcatccggcaaccgtgccgactagacagtgattaccatttcaccgtcatcgacaaaaaccctgccgtctgggcaaaatcatcactccctttctgccacgccacgctgccgcgcagggacactcgctgactgatattgcccgtgactcccacttttatttcaccccgttgcttcaccgcatcgtcactgatagtgctgccatcctcttcaatttccgtcgaatggggatcgtgataataattcagatctaatgttggtatgacatgaacagcggtacgccattcgctgtgtaaacccagccgcgtctgaatatcatcaccctgcgattgtgacacgcgcgcacggttagcggcggtaaaatcatcctgctgcacgccctgataaatcacctgcgcctgcggttcaatcaccacaccacgccccggtaaccactgataccccgcctccagcgaggcgataatccccgacgagtggtaatgatctgtgccatcttcttgttcggaaacatcattgctaaaccacgcgtattgcagccagctatccagccaggccccttgcttctgattaccgtgctgaaaccagcttgatgtcagcccaacggcataaccgtggttctggttatcggcgcgagttccggtcatattcgagcggctgtcgccctggttatcgctgtagccaccaacaatcccaagcatccactcgccatccgtgccccagcgcccgctaaacagatcgccgctaagttgcaccgtagaagtgtcttcatgttgagccagttgccccgctgctgtgtaatgataatctccgccgataacacgtaaattcagcgtctgaccatcgccacctgcgtgatcgcgtcgctccatcataaacgcctgatttgccgcccgcaggttattaagataaccgccaactttggcattcaacaccggctggtaagcaggcgtaggttccgggtcgggtgttggatcaggatccggcgtgggatcaggatcgggagtcgggtctggatcaggtggcgatggcggcgttacttcttgcgatcgcagataccagtcgttgttatcttccaccagcgtgtagtcatacgctcccatattgacgtagccgctgcctgccagactgaactgcgcattgttttgaaactgcgtgggatcagctgcgaaatcaaccactttaatgcctgtcgatgtcggctcaccaatccctgtaatggagttaaccaccacagttgtgttgccagcagtattaccgttcatcaccaattgatcgcttaccgagtcatcgccgtttaattcgctatcgagcagtagcgtaccgccgccggtataatcaccgtttaccgtcagcgtatcgccagcgacgccattttgcaggctaaccgcaccggacgtattggtcagattgccattaaccgtcacgttggaaagataagtcaggctgtcagtttcaaggttggtattaagctcacctgtcaacgtcacaccatcggtggcattcaccagcgtcccatcgccgttaaatagtgaggcattaagggcgacggaagtatcctgcccggtcaggcgcaaaaccgtaccatcgctgatgtcgatagtgccgctggaaatagcatcaattgactgaatatcctgatccgcgccagtaacgaacgttgccccatcaccaacccacagtgacgaagcataaggaaggatatcagcaacatcacctttcagggtgccttcttcgacacgtaccgccgactgcgttgtaccgctggcggtcagctccagtgtaccagcccccgttttagtcaatgtgctaccctcatcctgatgctgcccgctgctgtcagccatcagtgcgccccactgcgtgtctacccccgcatcaactgccacttcaccgtcggcgcgcatttcaatatcacgtccgtggcctgccgcatctgaacgcgtgtcaacgtcggaggtaatctccatcacgctttcttgttgcttatcggtaaagataacctggcggttatagtgggtatctccaagctgcgagttgtcgctcaccatcagcgtaccggaggcgatttgtgttgtgcccaaataactattattgtttgccagacttacctgcccgtcgctcgcatcgaccaccacgtagacgccatctttcccgtcgccgccgatatgcaaattgtcgccacctgcaagatctaccacatcctgactgccgataaccgttccgctgctgccactgacttcaaggccatcgttgtatgatgtgccgctctgccaggtggagaaatcagagagatcgagcacaccgccgtttaacacgatcgactgcggatcgtcctggagagcggtaagatctgccgcgtcgccttccagcgaaagcaccgcaccatcatcaacgactatatcgccggttagcgccatcgactgcgcccctgccagcacgtagctgccgttttgcgcaatggtgagctgaccagcaccttcgatgatgccagcaaaactgccctgattaacagtaacgttgccaccagcatcgatatttaaagtgccattctgaaagcccgtcaatgcgtgcacaaaagtttgttgggtcgagccaacgtttagctcagcctgattctgatactgatcaatactccctatcgtcagaccgtagcagtcttgcggatcgtcctggcaatgcgtatcgccgacattcatcagggagttgctgcggcccagggtaacttcaccgttttcaatctgcatctcaccagtaaagtcattgttatctgcattaagtaccagatcgccggaacctgttttggtgattaacccggtaccagcaatagagtcaacagctccgtcattctctgtattgccaataaccagcgtttttccgtcggcaatatcaaaggtaacttcacttaagccgagatacataaagccacccgccgcagaggaaggaccatctccatagcctgctgcgctattgttctcatcgactaacacgcctccgttctggctgtagctgtcatcaacagaaatatcaataagatagggagccgtcacgctattggtatatatcgccccgccataaccttcggcagtgttatttgtaaaggcagtgttatttactatcgtataacctgaaggatgcttgctgtcgctattattatcggtaacatcgattgccccgccatcgccatcactgtaacttgttgatgtatatgcctggttgttatcaaaaataacatcacttaaataaacgtcattattaatggtataaattgcgccacctttgccatcattagcgatgttattgcgaaacatggcgttagtgacacgtaaatcgacggcaccagtatcgttagtaccagaagaatagattgcgccaccatagccgcctgcgacgttaccggaaaaaataacatcagtaagattcagcgttgagttttctttagcaaatatggccccgccgttattatattctcctgtaacggtgttattggcaaacagagtcattccagtttcattttctggtaatagtgaaaattccgctccttgttgcaaaaatacggccccaccgctggcgttattggtcatatccgaaaaaaccagccattgcccatcagcgatactccagtcctgcgtaatgcctgaaaggctttgcctgctggcctgacaactcgctttgacatcatatccctggcatgaatcagtgaccgccgcgacaccgttagcagagaaaagagatgcaatcattgacgggagtaaagataaatactccttgcgtagaaagataatccgcatattaatctaaccatcattttctataagacggcgtatttaatcgcattatacgatatggaatatctttcttttgtaaattgttcaacccggtgcaatggctattttgttattatttgatgaataatatcagtgcgtcataattcaagttaataaccttcagggatatcagttatatttaaactaaattaaagtcatgaataattttcttataatataaggtaaattaacaaaatggcttagcatttaacaataaccgaatagaaaacaaccatttcgccatcaacaatctcttacattcgcttatatattgaccacaactgatacatcagattatgtgatgactcgtgcttagatcaatttttgcaatcattagcaaaaagattaataagccatctatatcaatttatctaacctattatgccgttcaagaaatcgccgaacagttatttttaacaaatttttctcttcccattgactttcccggacaccttgtctgacctaaggtgcgcgaaagccactttttccttcctgagttatccacaaagttatgcacttgcaagagggtcattttcacactatcttgcagtgaatcccaaacataccccctatatatagtgttctaagcagcttcccgtactacaggtagtctgcatgaaactattgcggaaagaattccaaaaacaggtacgacatacatgaatcagaatctgctggtgacaaagcgcgacggtagcacagagcgcatcaatctcgacaaaatccatcgcgttctggattgggcggcagaaggactgcataacgtttcgatttcccaggtcgagctgcgctcccacattcagttttatgacggtatcaagacctctgacatccacgaaaccattatcaaggctgccgcagacctgatctcccgtgatgcgccggattatcagtatctcgccgcgcgcctggcgatcttccacctgcgtaaaaaagcctacggccagtttgagccgcctgcgctgtacgaccacgtggtgaaaatggtcgagatgggcaaatacgataatcatctgctggaagactacacggaagaagagttcaagcagatggacacctttatcgatcacgaccgtgatatgaccttctcttatgctgccgttaagcagctggaaggcaaatatctggtacagaaccgcgtgaccggcgaaatctatgagagcgcccagttcctttatattctagttgccgcgtgcttgttctcgaactacccgcgtgaaacgcgcctgcaatatgtgaagcgtttttacgacgcggtttccacatttaaaatttcgctgccgacgccaatcatgtccggcgtgcgtaccccgactcgtcagttcagctcctgcgtactgatcgagtgcggtgacagcctggattccatcaacgccacctccagcgcgattgttaaatacgtttcccagcgtgccgggatcggcatcaacgccgggcgtattcgtgcgctgggtagcccgattcgcggtggtgaagcgttccataccggctgcattccgttctacaaacatttccagacagcggtgaaatcctgctctcagggcggtgtgcgcggcggtgcggcaacgctgttctacccgatgtggcatctggaagtggaaagcctgctggtgttgaaaaacaaccgtggtgtggaaggcaaccgcgtgcgtcatatggactacggggtacaaatcaacaaactgatgtatacccgtctgctgaaaggtgaagatatcaccctgttcagcccgtccgacgtaccggggctgtacgacgcgttcttcgccgatcaggaagagtttgaacgtctgtataccaaatatgagaaagacgacagcatccgcaagcagcgtgtgaaagccgttgagctgttctcgctgatgatgcaggaacgtgcgtctaccggtcgtatctatattcagaacgttgaccactgcaatacccatagcccgtttgatccggccatcgcgccagtgcgtcagtctaacctgtgcctggagatagccctgccgaccaaaccgctgaacgacgtcaacgacgagaacggtgaaatcgcgctgtgtacgctgtctgctttcaacctgggcgcaattaataacctggatgaactggaagagctggcaattctggcggttcgtgcacttgacgcgctgctggattatcaggattacccgatcccggccgccaaacgtggagcgatgggtcgtcgtacgctgggtattggtgtgatcaacttcgcttactacctggcgaagcacggtaaacgctactccgacggcagcgccaacaacctgacgcataaaaccttcgaagccattcagtattacctgctgaaagcctctaatgagctggcgaaagagcaaggcgcgtgcccgtggtttaacgaaaccacttacgcgaaagggatcctgccgatcgatacctataagaaagatctggataccatcgctaatgagccgctgcattacgactgggaagctctgcgtgagtcaatcaaaacgcacggtctgcgtaactccacgctttctgctctgatgccgtccgagacttcttcgcagatctctaacgccactaacggtattgaaccgccgcgcggttacgtcagcatcaaagcgtcgaaagacggtattttgcgccaggtggtgccggactacgagcacctgcacgacgcctatgagctgctgtgggaaatgccgggtaacgatggttatctgcaactggtgggtatcatgcagaaatttatcgatcagtcgatctctgccaacaccaactacgatccgtcacgcttcccgtcaggaaaagtgccgatgcagcagttgctgaaagacctgctcaccgcctacaaattcggggtcaaaacactgtattatcagaacacccgtgacggcgctgaagacgcacaagacgatctggtgccgtcaatccaggacgatggctgcgaaagcggcgcatgtaagatctgatattgagatgccggatgcggcgtaaacgccttatccggcctacggctcggtttgtaggcctgataagacgcgccagcgtcgcatcaggctccgggtgccggatgcagcgtgaacgccttatccggcctacggctcggatttgtaggcctgataagacgcgccagcgtcgcatcaggcacaggatgcggcgtaaaatgccttatccggcattaaactcccaacaggacacactcatggcatataccaccttttcacagacgaaaaatgatcagctcaaagaaccgatgttctttggtcagccggtcaacgtggctcgctacgatcagcaaaaatatgacatcttcgaaaagctgatcgaaaagcagctctctttcttctggcgtccggaagaagttgacgtctcccgcgaccgtatagattaccaggcgctgccggagcacgaaaaacacatctttatcagcaacctgaaatatcagacgctgctggattccattcagggtcgtagcccgaacgtggcgctattgccgcttatttctattccggaactggaaacctgggtcgaaacctgggcgttctcagaaacgattcattcccgttcctatactcatatcattcgtaatatcgttaacgatccgtctgttgtgtttgacgatatcgtcaccaacgagcagatccagaaacgtgcggaagggatctccagctattacgatgagctgatcgaaatgaccagctactggcatctgctgggcgaaggtacccacaccgttaacggtaaaactgtgaccgttagcctgcgcgagctgaagaaaaaactgtatctctgcctgatgagcgttaacgcgctggaagcgattcgtttctacgtcagctttgcttgttccttcgcatttgcagaacgcgaattgatggaaggcaacgccaaaattattcgcctgattgcccgcgacgaagccctgcacctgaccggcacccagcatatgctgaatctgctgcgcagcggcgcggacgatcctgagatggcggaaattgccgaagagtgtaagcaggagtgctatgacctgtttgttcaggcagctcaacaggagaaagactgggcggattatctgttccgcgacggttcgatgattggtctgaataaagacattctctgccagtacgttgaatacatcaccaatatccgtatgcaggcagtcggtttggatctgccgttccagacgcgctccaacccgatcccgtggatcaacacttggctggtgtctgataacgtgcaggttgctccgcaggaagtggaagtcagttcttatctggtcgggcagattgactcggaagtggacaccgacgatttgagtaacttccagctctgatggcccgcgttaccctgcgcatcactggcacacaactgctgtgccaggatgaacacccttcccttctggcggcgctggaatcccacaatgtggcggttgagtaccagtgtcgcgaaggttactgcggctcctgtcgcacacgcctggttgcaggtcaagttgactggattgccgaaccgttagcctttattcagccgggggaaattttgccctgttgttgccgggcaaaaggcgatattgaaatcgagatgtgaattggttgtagtgccagatacaacgcttatgcgtcttatctggcctacaacgattacatggcgtagtaatacgctttcacctgctcccagtccgctttggggattggctccagatatttttccagctggcggaagtcatgattaatcgctttatcgcgacgcaagcggcgacgacttttctccaggtcaagaaaaccagcttctgcattaccttctgttttcacatagatatggcgaacataacaacagccatgctgacgattaatgctatgcattttcttaaacgccagcgccactgctttcaacatggcttgccgtacttcgtcagaataaggcgatactgcatgctgggcataccagtcagcaatgctgatgaaccccgccatatcttcagtcaccagcaacgctcgccattcaccctcaattttcaccgcttcaccaaaaacgatcttcggcacgatgacaccggcccgttccagttctttaattaccgcaacctcacggacaatcgttggtcggccgaacggataacgtacggaatgaaacagatgatgcgtcatgcgctttacatacagctttttgccgttgcgctcgacgcattgcaccccgctcataccattacggcgatagttaggctcttcaacccagtcgccctctgttgcccaccagtgattaaattcgtcgtactttgctgaaactgccataccctatcgcctgtcatttttattaacgacaatgactataggtggttacctgaggaaaatcttaatgaaacgtgtcgtattaatgaatttcttttgccactactagcttgacaccgcttttacccttcatttgcagcgcatagattccaccagccactaccactaatagtgcgcccagcagataaaatgtgaatttaatcaggcggatacagcgatgaattttattcgacagggattaggcatcgccttacaaccagagttaacgctgaaaagcattgcaggtgaattgtgttccgttcctctcgaaccaactttctatcgacagatttcgttgctggctaaagaaaagccggtagaaggcagtccactgtttttactacaaatgtgcatggaacaattagtggcgattggaaaaatttgatatgagacaggatggcgcatgaacgccatcctgcagtaacattactctttattaagaaattttactgccttatcagggaaatcagtaaacagcccatttacacccgctttgttatacagagcatcatataactgattcacatcaggagtgtattcaggcagtttatctgaccgcacggtataaggatgcactaccagtttattctgctgagcatcttgcaccatgccagtgagtttgatattacccggctgcgatgtctcctcaatcaacatatggtaatccggaccaataccatctgcatattccgccacctgtttcatggcacccggcttaaacatccagtcgtagttgtaattaacccagcttccatccggctgtttctgctgcgtttcattccagtcggtataggcaatcagctgtaccagattgagctccatgcccattttgggttccagctcattcttaatacgcttcagctcatcagcatcaaaacattgcaaataaactttatcgtctttaccggtgtaaccatatttcttcagcacttccagcgtttttgccgcaatatccttcccttcctgatgatggaaccacggcgctttgatttctggataaataccgatatttttcccggtagagtgatttaacccctgaacaaattcaatctcttcttcaaaggtgtgcacccggaagtcggacttacccattgggaaacgccccggataagtctgcacttttttaccgttttcaatatcgaaaccttcggtaaatttcaacgacttaatttcatccagcgtgaaatctatcgcgtagtaacgaccgtctttgcgcgcccgatccgggaaacgatcggcaacatcagtaacacgatcgaggtaatggtcatgcagaacaaccagattgtcgtctttggtcatcaccaaatcctgttccagataatccgctccctgcgcatacgccatcgcttttgctggcagcgtatgctccggcaaatatccactggcaccgcgatgggcgatgactattttttcgttgctgtccgccgccattgcactgcttcccatgactatagtgctcatcatgatcgccatgctaaggtttttcagcgtcaatttcatgccattagcctccgttgcgttcttgcagtaattgttcatggcgacgtttttcgccaatcatcacaacaatcaacaagataaccgccagaatgctgccgccaatcattaccataaagccgccatcccagccgaagaagtccacggtgtagccaacaatcgcgctcgccgccaccgaaccgcccaggtaaccaaacagcccggtaaagcccgctgccgtacctgccgcttttttcggtgccagttccagcgcatgcagaccgatcagcatcacaggaccgtagatcaggaagccgataacaatcatacaaatcatatcgacggttgggttacctgccgggttcatccagtaaacgatagtcgcgatggtcaccagtgtcataaagaaaacgccggttgccccacggttgccacggaagactttatccgacatccagccgcacagcagagtgcccggaatacctgcatattcataaaggaagtaggcccaggaggatttatctagcgcgaaatgcttaacctctttcagataagtcggtgaccagtcgaggatgccgtaacgcagcagataaacgaacacgttggcgatggcgatataccacagcagtttgttcggcagtacgtactgcatgaagatttgcttcgccgtcagctcctgttccgctttttcgttatagtcgtccggataatcatttttgtactcttcgatcggcggcaagccacaggattgcggggtatcgcgcatcatcgcaaaggcgaataatgccaccagaatggcgcagaaagcaggcatatagagcgccgcatgccagtcattgaaccaggccatccccagcaggaacagcagcggcggaataccaccaccgacgttgtgcgcacagttccacactgacacaatgccgccacgttctttctgcgaccaccagtgcaccatagtacgaccacacggcggccaccccatcccctggaaccaaccgcagaggaacaacagtacaaacatcaccgcaatgctcgacgtcgcccatggcacaaagcccataaacaacatcactgccgccgccagaatcaaacctgcgggcaggaaaacgcgcggattcgagcgatccgataccgaacccatgatgaatttcgaaaatccataagcaatcgagatccccgaaagggcaaaacctaaatcaccgcgtgagaatccctgctcaaccagataaggcatagcaagcgcaaagttcttacgaaccaaatagtaagccgcatagccaaagaatatccccaggaaaatttgccagcgcaatcgacgataagtcggatcgatctccgcggcaggtaagcgcgctttgtgtggcgctggtttaaaaatactcaacattgatagcctccgtggcccgtggtcttatttatgattaacagcctgattcagtgagagaacctgccgtttcttgagttgccgcgatgttaagaaaacattcataaattaaatgtgaattgccgcacacattattaaataagatttacaaaatgttcaaaatgacgcatgaaatcacgtttcactttcgaattatgagcgaatatgcgcgaaatcaaacaattcatgtttttactatggctaaatggtaaaaaacgaacttcagagggataacaatgaaaactcgcgactcgcaatcaagtgacgtgattatcattggcggcggcgcaacgggagccgggattgcccgcgactgtgccctgcgcgggctgcgcgtgattttggttgagcgccacgacatcgcaaccggtgccaccgggcgtaaccacggcctgctgcacagcggtgcgcgctatgcggtaaccgatgcggaatcggcccgcgaatgcattagtgaaaaccagatcctgaaacgcattgcacgtcactgcgttgaaccaaccaacggcctgtttatcaccctgccggaagatgacctctccttccaggccacttttattcgcgcctgcgaagaagcagggatcagcgcagaagctatagacccgcagcaagcgcgcattatcgaacctgccgttaacccggcactgattggcgcggtgaaagttccggatggcaccgttgatccatttcgtctgaccgcagcaaacatgctggatgccaaagaacacggtgccgttatccttaccgctcatgaagtcacggggctgattcgtgaaggcgcgacggtgtgcggtgttcgtgtacgtaaccatctcaccggcgaaactcaggcccttcatgcacctgtcgtggttaatgccgctgggatctgggggcaacacattgccgaatatgccgatctgcgcattcgcatgttcccggcgaaaggatcgctgctgatcatggatcaccgcattaaccagcatgtgatcaaccgctgccgtaaaccttccgacgccgatattctggtgcctggcgataccatttcgctgattggtaccacctctttacgtattgattacaacgagattgacgataatcgagtgacggcagaagaggttgatattctgctgcgtgaaggggaaaaactggcccccgtgatggcgaaaacgcgcattttgcgggcctattctggcgtgcgcccgctggttgccagcgatgacgacccgagcggacgtaacgtcagccgtggcatcgtgctgctcgaccatgctgaacgcgatggtctggacggatttatcaccatcaccggtggcaaactgatgacctatcggctgatggctgaatgggctaccgacgcggtatgccgcaaactgggcaacacgcgcccctgtacgactgccgatctggcactgcctggttcacaagaacccgctgaagttaccttgcgtaaagtcatctccctgcctgccccgctgcgcggttctgcggtttatcgtcatggcgatcgcacgcctgcctggctgagcgaaggccgtctgcaccgtagcctggtatgtgagtgcgaagcggtaactgcgggtgaagtgcagtacgcggtagaaaatttaaacgttaatagcctgctggatttacgccgtcgtacccgtgtggggatgggcacctgccagggcgaactctgcgcctgccgcgctgccggactgctgcaacgttttaacgtcacgacgtccgcgcaatctatcgagcaactttccaccttccttaacgaacgctggaaaggcgtgcaacccatcgcctggggagatgcactgcgcgaaagcgaatttacccgctgggtttatcagggattgtgtggtctggagaaggagcagaaagatgcgctttgatactgtcattatgggcggcggcctcgccggattactctgtggcctgcaactgcaaaaacacggcctgcgctgtgccattgtcactcgtggtcaaagcgcactgcatttctcatccggatcgctggatttgctgagccatctgccagatggtcaaccggtgacagacattcacagtggactggaatctttgcgtcagcaggcaccagcccatccttactcccttctcgagccacaacgcgtgctcgatctcgcttgccaggcgcaggcattaatcgctgaaagcggtgcgcaattgcagggcagcgtagaacttgctcaccagcgggttacgccgctcggcactctgcgctctacctggctaagttcgccagaagtccccgtctggccgctgcccgcgaagaaaatatgtgtagtgggaattagcggcctgatggattttcaggcgcaccttgcggcagcttcgttgcgtgaactcggccttgccgttgaaaccgcagaaatagagctgccggaactggatgtgctgcgcaataacgccaccgaatttcgcgcggtgaatatcgcccgtttccttgataatgaagaaaactggccgctgttacttgatgcgcttattcctgtcgccaatacctgcgaaatgatcctgatgcccgcctgcttcggtctggccgatgacaaactgtggcgttggttgaatgaaaaactaccttgttcactgatgcttttgccaacgctgccgccttccgtgctgggcattcgtctgcaaaaccagttacagcgccagtttgtgcgccagggtggcgtgtggatgccgggcgatgaagtgaaaaaagtgacctgtaaaaatggcgtagtgaacgaaatctggacccgcaatcacgccgatattccgctacgtccacgtttcgcggttctcgccagcggcagtttctttagtggcggactggtagcggaacgtaacggcattcgagagccgattctcggccttgatgtgctacaaaccgccacgcggggtgaatggtataagggagatttttttgcgccgcaaccgtggcagcagttcggtgtaaccactgatgagacgctacgcccgtcacaggcagggcaaaccattgaaaacctgtttgccatcggttcggtgctgggcggatttgatcccatcgcccagggatgcggcggcggtgtttgtgccgtcagtgctttacatgccgctcaacagattgcccaacgcgcaggaggccaacaatgaatgacaccagcttcgaaaactgcattaagtgcaccgtctgcaccaccgcctgcccggtgagccgggtgaatcccggttatccagggccaaaacaagccgggccggatggcgagcgtctgcgtttgaaagatggcgcactgtatgacgaggcgctgaaatattgcatcaactgcaaacgttgtgaagtcgcctgcccgtccgatgtgaagattggcgatattatccagcgcgcgcgggcgaaatatgacaccacgcgcccgtcgctgcgtaattttgtgttgagtcataccgacctgatgggtagcgtttccacgccgttcgcaccaatcgtcaacaccgctacctcgctgaaaccggtgcggcagctgcttgatgcggcgttaaaaatcgatcatcgccgcacgctaccgaaatactccttcggcacgttccgtcgctggtatcgcagcgtggcggctcagcaagcacaatataaagaccaggtcgctttctttcacggctgcttcgttaactacaaccatccgcagttaggtaaagatttaattaaagtgctcaacgcaatgggtaccggtgtacaactgctcagcaaagaaaaatgctgcggcgtaccgctaatcgccaacggctttaccgataaagcacgcaaacaggcaattacgaatgtagagtcgatccgcgaagctgtgggagtaaaaggcattccggtgattgccacctcctcaacctgtacatttgccctgcgcgacgaatacccggaagtgctgaatgtcgacaacaaaggcttgcgcgatcatatcgaactggcaacccgctggctgtggcgcaagctggacgaaggcaaaacgttaccgctgaaaccgctgccgctgaaagtggtttatcacactccgtgccatatggaaaaaatgggctggacgctctacaccctggagctgttgcgtaacatcccggggcttgagttaacggtgctggattcccagtgctgcggtattgcgggtacttacggtttcaaaaaagagaactaccccacctcacaagccatcggcgcaccactgttccgccagatagaagaaagcggcgcagatctggtggtcaccgactgcgaaacctgtaaatggcagattgagatgtccacaagtcttcgctgcgaacatccgattacgctactggcccaggcgctggcttaaactcctttctgatgcccggtaagcatgtggttaccgggcatttttgcgtacacgattccgtgcccaatgtatgcgttgcaacgcagtgaaaattcctctgaaaacgtctcgcaaaggctgaaactggcagatgtcaaaggcctgggataaccgtaatgtcgcgtcatcataaatatcaggtgacggacaaccatgaccgaatcaacaacctcctccccgcatgatgcggtatttaaaacctttatgttcacacccgaaaccgcacgggattttctcgaaatacatttaccagaaccactgcgcaagctttgcaacctgcaaaccttacgcctggaacccactagttttattgaaaaaagtttacgcgcttactactcggatgttttgtggtccgtggaaaccagcgacggtgacggctatatctactgcgtgattgaacatcaaagctctgcagaaaagaatatggcttttcggctaatgcgctatgccactgccgccatgcagcgtcaccaggacaaaggctatgacagagtcccgctggtggtgccgttgctgttttatcatggcgaaacctcgccttacccgtactcactcaactggctggatgagtttgacgatccgcaacttgcccggcagttgtacaccgaagcttttctgttggtggatatcaccatcgtacctgacgatgagatcatgcaacatcggcgtatagctctgctggaactgattcaaaagcatattcgcgaccgcgatttaatcggcatggtcgacaggatcaccacgcttttggttagaggcttcactaatgacagccagctacaaacactgtttaattatctgctgcaatgcggcgatacctcccgtttcacccgttttattgaggagattgccgaacgttcaccactacaaaaggagagattaatgactattgctgaacggctacggcaggaagggcatcaaattggctggcaggaaggtatgcatgaacaagccattaaaattgctttgcgcatgctggagcagggctttgaacgtgagattgtgctggcgacaacccaactcactgatgctgatattccgaactgtcattaaaaggagagattaatgactattgctgaacggctgcggcaggaaggacatcaaattggctggcaggaaggtaaattagaaggtttgcatgaacaagccattaaaattgctttgcgcatgctggaacagggctttgatcgtgaccaggtgctcgcggccacccagctaagcgaagccgatctggcagcgaataaccactaattaacacaggcccacagccgatccccatgggcctttgatatcaataactaccttttatgcgtggcccatttttgcctgatttaaacatcgccagtcgttgatccagggcatcgctgtagagcatcgtgtcaacgccaacagcgacaaagttcgctccccacgccaggcattgctgcgccatatcaggagccacagccagaaaaccagccgctttacccgcagcacggatccgccgaatactggtttcaataattcgctgcacttccgggtgcccggcgttatccgggtagcccaacgacgcagaaagatccgcaggtccaataaacacgccatcaatcccttcgacgtcgaggatttcgtccaggttatccagtgccgttttactttccacctgcaccaacagacaaagcgaatcgttaacttgcgccatgtaattctcaatgcgtccccagcgcgcagcccgtgccacactggccccgacaccacgctcaccgtagggaggatagcgcgtggcagacaccacctgacgtgcctgttcggcagtatcgaccatcgggatcagtagagtttgcgcgccaatatccaggacttgtttaatcagcggtttactgccttccaccggacggatcacgggttggctggcatagggcgctaccgcctgtagctgatgataaagatcctgaatggtgtttggcgcgtgctccccgtcaatcagcaaccagtcataaccagaagtggcggcaatttctgccatataggcagtcgttgagcttaaccacagaccaatttgcacttcgcccttgcgtaaacgttctttaaagggattgcttaataatgcgttcatcgtgttccttaacctatttaatgatgtgccacgtcggtctgcgcaacagtgcgatttacacgcagagtgaaaataatcagcgaaccgatgaccgccaccgctgccagcgtcagtaatcccgccgcatcgctggcaaataacgtttctgctttcacgcgcaggatcggggcaataaacccgcccactgcaccaaacaggtttacaaaaccaattcccgcagccagcgccgtaccggaaagcagttgtgtcggcatcgtccagaacactggctgcacggcaataaacccgatagctgcaacacacagcgctacgatcgccattactggagaaagcagcccggacagaccaataccaatgcccgccgccagtaatgtcagcgctgcgacattacgccgttcgccggttttatcggaatagcgcggaataagccaggtcccaaacaaggccgcaacccacggaatggcggtgaccaccgacgctgtaaagcccacttttgttcccagcaatgccgcaacctgggtcggcaggaagaaaattaatccgtaaaccgccacctgaatggtcaggtagataatcgctagttgccagactcggccattacgcagcgcatcgctcagccgagaagtcactttctgttgttcttcacttgccagttgattgataagcaacgttttttcttgtttactcagaaaacgtgcctgctccggtgtgtcatcaagccaaaagaatgtgaataccccagcaccgactgccaacaatccttcaatcacaaacatccagaaccagccgggatgccccataaatccatgcatctccaacagcgcgccggaaagcggtgatcccagtgttaacgccagcggtgcgcccatatagaacagccccataatgctggcgcgattacgctgcggaaaccattgcgaggtgagataaatcataccagggaaaaatccggcctccgcagcacgaagcagagtgcgaactatcagaaatttcgcttcagtatcggcccatgccatggctgccgaaagaaatccccacagcagtgttgtcgtaccaatccaggttctggcccccagtttgcgcatcaaaagattcgccggaacacccagaaacgcatataccacaaagaaaatgcctgctcccagcgcataagcttcattactcaacccggtatcaatctggtaggtctgtttggcaaaaccgatattcgaacggtcgagaaacgccagcacatacagcgccaacataaacggaattaaacgcacacggtttttcttcaccacggcgtcaagcaaagcggtgctcataaaaagctccttagaatatgtgggcgttaccgttgtcacagcaacgcccggagtgattagtggctgtaggggcgtttcaaattgcagtcacgattgagttcgacgccaaaaccgggtttatcaagcactgatttatgaatacgaccattcaccggaaccggctcattgagcagaatcgggtcaaactgcggacgcatcgttgaacaatccgggctggtcatcaggaattcgctgaatggcgtattggtgaaggtgatcaccgcatggtgagagtaaacagacgaaccgtgcggcaccaccagttgccccctggatttggcgattgcggcaatttccaccagcgtggttaaaccaccgcaccagccaacatccggctgcataatgtcgataccggtttctgaaagcgtacgaaaagattgcagtgtgccgtggtgctcaccgctggtgaccatcattccgactggcgcgttgcgtttcagttcgcgataactttcatactgctgtggcggcaggcactcttcgatccatttcaggttatagggcgcgcaagcgtgggccagtttggtcgcatagttcacgtcctgactcatccagcagtcgagcattaaccagaaatcctcaccgcatttttcacgcatatccgcgaccatagcggcatctttgcggatccccgcatcgccatcatgtggcccccagtgcgtcggcattttgccaccgataaagcccatctcttttgccagatccggacgcgcacctgtggcgtagaactgaatctcatcacgaacagcgccgcctaaaagtttataaaccggaagcccgaccactttgccgaacagatcccacagagccagatcgacacaagaaatcgtattcatcaccaggccaccagagccggagtaatacagggtggcactgagcatttgatcgtggatcagtttgatatcactgacacatttaccctcaatgaaacggttaagatgtttttcgacaataaaacagcccatttcaccggctgtcgaaacggcgaatccggtctggccgttttctgcttcgacttcaacaaccaacgtgccaagaacgttaatgccaaatgactggcgtgactgctcgtaatcgcggtatttactcatcggggtggcaatatgatcgtctatccagtgattcgccccctggtcgtgataatcaccgccgccagcgcctttttctgctgtcgcaccgccagtaaaccaggcgcgaacctgtttaatttttggtagggtcatgatgttctccattgttatgaggcttgtaagtcaaagggacttttccatcccaacagacgtgaaatatccctggcgcaggcaatggccttgcccgccagataatcacggtattcttcattgatttgtaagcgggtaccgaccaccgagatcgcagcggtaagctcgttattggcgttaaacaccggcgcagcgacacaacggacatcggcgtaatcttcgccgttgtcatagctccagccctgacggcgaatacgcgccagttcttcgtgaagttgctgtggatgagtaatcgttgtgggtgtcgcctgctcccagaccagcccttcgataatactttgctgtaccgctgcaggttgccaggcaagcaggcatttacctattccggagcgataaagcgaaaggctttttccttcatgggaacgcacgctgatagtggctgatgactccactttcaaaatgtaataagcgctgccgttatcaataatccccaggtgacataacagcccggtggtatccatcagttgcgtcaaacgcggtcgagccagttcccggagatccatcttgcttaacgcatgaccggaaagctccaccagcctggtccacaaacaaaaattttcctggtgatcaaggctaagaaaacgctgacgcctgagttcattaagcagcaaataggccgtgcttttagggattcccaatgtgtcaatgatcgtcgcagcactacaggggccaatgcgggcaatcaaattgagaatatcaatagcccgtgtcagggcgggaactttgcttgattccaacatactggactccagtcttagatactggaatcagtctcgttgctcagggggagtaaaattgtgaagcgcatcaaatcccgctcctcgtccagcagactggagaaattacgcacaaatttgtgaatcagcgcacggattttttcttattgagtacaacaggttggacaaattttgccggagggggaatgtgccggtgcagtaaaccggcacagagtggcggaatcagacagataaggtcatggactcaacaacctcaatccagccatgctcactggcgatatcctggccgtttaaccaacggcgcagcatattcagtgccatcattgcgcacacttcctgacggatagccaggctgtagcgcgtagtgctgaaacgcacacgcagagcgaaagtgccgtctggcgtggctagcgcaaagttgagatgctcgttctcgaaacccgaaacagccagtgccagcccggcaaaatggttggcccgccgttctgtaatccagtgcgcagtttgcgccagggtttcctcctgtgaaggaaccacttcacacgccagcaatggagcacctgcgcgagaaagttgcaaagccaataaaccaccggtgaattgctcgctcaacgtcaggctgaactggcggttttgcaattcgcgactgatctgcgcgggcagtccttcagtgccttcgaaaatcacgctctgtccggcaacacgtttaacatccagccacagtttttccatcgcctgttgctcgcttgccggtccggtgagtttcagttcgatgataggcattgaggagcgatagcccattgttacgcccggcggcagttgtagagtgtccaggctttgtgccagatcgctttccgaacgaccaaaagtagtcaaacgcagacaaaccggcggctgcggtaaagaaaaacgctcgcgcaggcgcggcaggatttcgtgctcgaccatcaccttaaattctgacggtacgccgggagtaaagaacatcaggcaacgattaagctgcacggcaaaaccacaggcggtgcctaccgggttattgataaattcagcactggcaggcagctccgcttgtttacggttgctcggtgccattactcgtccacgttcgtggaaatagcgttccatctctttgagccaggcttcatgcagcaccaggccttcaccttttgctgtcgcagcggcgagtgcgcttaaatcatcgctggtcggtcccagcccgccgttaacgatcagcacatcggcgtgctgactacgttcgcgaagaatggtgactaagtcatcaaggttatcccccaccgtattgcggcgagataatggcaacccctgatgaaagaaaaaatcggccagccaggcagcgttagtgtcaacgatttgcccgtgtaacacttcatccccggtggataacatttccacttttaacatggttatctcctgcttttgttatcgaatcactataacgcaaagggagataaggcgtagtaagaaactgaatggcgcgacagaatgccgcgccggaagggatcagaaactggcgttaaccccaacatacgggccgtcagccacggcgttgtcgcggttaccgtctttacccgacagattcaggtagcgataacccgcctcaatactgactggacgcataatggtgtaacgcgcgccagcattcgcttcttcataactttgaataccgctggagagcgaatccggagagtagtaatactcgccaaacaaacggaagctgttgccaattttccactgcaaaccacctcctaccgctgcggcataaccttcatcgccgtaattcgggttggtgtaaacgccttttccgccaacggtcgccattaacggcccgagaggcagattcaaccccagccccacgccagcgacatcaccgtcgtcgtcgttatgtgtccagttaccgcttaacgccaggcccgtcgtttcagtcccaaaaccgacaccaatattggtgtattctttacccgcctgaccgctgatgctcattgcattgaccgatgcagaaaccaacagcattccggccagacctgctagcgcaatttttttcattatcccctttcccacaagcaattaatcaaaattcccaaagctgcgggattgtactgcctggcacagaggattcaatgagcgaaaaaaaggatctagtcacttattgtaactaaatacttcttaaataattaaatgccgaaaaaataaacacactttatcgatacacacaaaaataataataagtacagttatcatcgcaaaagagattactgtcactttcacatatttgtgagttaccgtattctcatggtttctttttatttataaggaatatccctgtgcgacaacggactattgtatgccctttgattcaaaatgatggtgcttatttgctgtgtaaaatggccgacgatcgcggcgttttccccggtcaatgggcgatttcgggtggcggcgtggagcctggcgaacgaattgaagaggcactacgccgcgaaattcgcgaagaactgggagaacagctgcttttgacagaaatcacgccgtggaccttcagcgatgatattcgcaccaagacgtatgcagatggtcgcaaggaagagatttatatgatttacctgatttttgactgcgtttctgccaaccgagaagtgaaaataaacgaagagtttcaggactacgcgtgggtaaaacctgaagatctggtgcattatgatttgaatgtcgccacccgaaaaacgttacgtttgaaaggtcttctgtaacaatgatgacagccattactggctgtcagattgaaaatttagtggttaacgaattccccatccagataaactttgcctttttccacatgcatgactaaaccatccagataatcaggtttaaatgtcgcgtcacgcttatctttagcaatatatgtcaggcaatgattatgggtgaaaataacgatatttttatcaggcgctttgctttgtaagtccttaattgcactataaatctcattaccgcactgaagaagtcgtttatctaccgtcaattttttacccgctgaaaaccaggtagccgactgaatggtccggacggtattactggaataaagatcgaaatcagggatatcagcactaaaagcgttgcccagttcacgggcatcctgggtacctttaaccgtaatacctgttttatctgacaagcattgattggttgaacggtcgcaacgttcagcatgacgaaacaaaacgacaaccgggtgctgctgtgccagtctggccagtgttttattgtcgatacgtggcaaaccattgctactccaggcggcatgagtacccagtccggcaattgcagcgagcgccagtaaaatgatgatatatttttttgacttcaacgaagagcggcaaaaagctaacacgtaaactccacctatagacaagcgcaaccagacaattaccgtgaaattgagctacatttctggcgataattcgcagttggtgtaatattaaaaatcctacgatgtcggcaaaatgcctcaaaattttgccaaatgcaaagcctaaataagaaaaaatataaaaatttcaatatttacgtctaatattagtttcttaaggttaagttaatattctatccttaaaatttcgctccaaatggcaaaatatacacaacactctttatagcaaatataagtggacaggtattcaatggcggaaggaaaagcaatgtcagaatttttgcctttttcgcgaccagcaatgggcgtggaggaactcgctgcagttaaagaggttctcgaatccggttggatcacaaccggtccgaagaatcaggcgcttgagcaagctttttgccagttgacgggaaatcagcatgccatcgcggtcagttcagccaccgccggaatgcatatcacgctaatggcgttgaaaattggcaagggcgatgaagtgattacgccttccctgacctgggtttcaaccctcaatatgatttccttgttgggtgcaacgccggtaatggtggatgtcgaccgcgatacgctgatggtcacgcctgaagctatcgagtcagccattacgccacgcactaaagccatcattccggtgcattatgccggtgcgccagcagatattgacgccattcgcgccattggcgaacgttacggcatcgcagttatcgaagatgctgcccatgccgtcggtacgtattacaaagggcgacatattggcgcaaaaggtaccgctattttttcatttcatgccattaaaaatattacctgtgctgaaggtggcctgattgtaactgataatgaaaaccttgcccgccagctacggatgctgaaatttcacggtctgggtgtcgatgcctatgacagacaaacctggggccgtgcaccgcaggctgaagtcttaacaccgggctataagtacaatctgaccgatattaacgccgcgattgccctgacacagttagtcaaattagagcacctcaacacccgtcggcgcgaaattgcccagcaatatcagcaagcactggcagctctcccctttcagccattaagccttcccgcctggccgcacgttcacgcctggcatctgtttattattcgtgtcgatgaacaacgttgtggtatcagtcgcgatgcgttgatggaagcgttaaaagaaagaggcattggtaccgggttacatttccgcgccgctcacacacaaaaatattatcgcgagcgttttcccacgctgtcgttaccgaataccgaatggaatagcgaacgcatctgttctttgccgctgttcccggatatgactaccgccgatgccgaccatgtcatcacagcccttcagcaactcgcaggacaataagccatgtttgaaatccaccctgttaagaaagtctcggtggttattcccgtttataacgagcaggaaagcttaccggaattaatcaggcgcaccaccacagcctgtgaatcgttggggaaagagtatgagatcctgctgattgatgacggcagtagcgataattccgcgcatatgctggtcgaagcctcacaagcggagaacagccatattgtgtctattttgcttaaccgcaattacgggcaacattcagcgattatggcgggattcagtcacgttactggcgacttaattattacccttgatgccgatctccagaatccgccagaagaaatcccccgcctggtggcaaaagccgatgaaggttacgacgtggtagggactgtacgccagaaccgccaggacagctggtttcgtaaaaccgcttcgaagatgattaaccggcttattcagcgcaccactggcaaagcgatgggtgattacggttgtatgctgcgcgcctatcgccgtcatattgtcgatgcgatgttgcactgccatgaacgcagcacctttatcccgattctggcgaatatcttcgcccgccgtgccattgaaattccagtacatcatgccgagcgtgagtttggtgaatccaaatacagttttatgcgcctgattaatttgatgtacgacctggtgacctgccttaccacaacgccgctacgtatgctgagtctgctcggcagcattattgcgattggaggttttagcattgcggtgctgctggtgattttacgcctgaccttcggaccacaatgggcggcagaaggcgtctttatgctatttgccgtgctgtttacttttattggcgctcagtttatcggcatgggattactcggtgaatatatcggcaggatctacaccgatgtccgcgcccgcccccgctattttgttcagcaagttatccgtccatccagcaaggaaaatgaataatgaaaaccgtcgtttttgcctaccacgatatgggatgcctcggtattgaagccctgctggctgccggttacgaaattagcgccatttttacccatactgataatcccggtgaaaaagccttttatggttcggtggctcgtctggcggcggaaagaggcattccggtttatgcgccggataacgttaatcatccgctgtgggtggaacgcattgcccaactgtcgccagatgtgattttctctttttattatcgccatcttatttacgacgaaattttgcagctcgctcccgcaggtgcatttaatctgcatggttcgctgttaccaaaatatcgtggtcgcgcgccgctgaactgggtgctggtcaacggtgaaacggaaactggcgttacattgcaccgaatggtgaaacgtgccgatgccggggccattgtggcgcaactgcgcattgccattgcgccagacgatatcgctattacgctgcatcataaattgtgccatgccgcgcgccagctactggaacagacattacccgccattaaacacggtaatattctggaaatcgcccagcgcgaaaacgaagccacctgttttggtcgcagaacgccggatgacagtttccttgaatggcataaaccggcatccgtactgcacaacatggtacgtgccgttgccgatccgtggccgggtgccttcagctatgttggcaatcagaaattcaccgtctggtcgtcgcgtgttcatcctcatgccagcaaagcacagccggggagcgtgatttctgttgcgccactgctgattgcctgtggcgatggcgcgctggaaatcgtcaccggacaggcgggcgacggcattactatgcagggctcgcaattagcgcagacgctgggcctggtgcaaggttcacgcttgaatagccagcctgcctgcaccgcccgacgccgtacccgggtactcatcctcggggtgaatggctttattggcaaccatctgacagaacgcctgctgcgcgaagatcattatgaagtttacggtctggatattggcagcgatgcgataagccgttttctgaatcatccgcattttcactttgttgaaggcgatatcagtattcattccgaatggattgagtatcatgtcaaaaaatgtgatgtcgtcttgccgctggtggcgatagccacgccgattgaatatacccgcaacccgctgcgcgtatttgaactcgattttgaagagaatctgcgcattatccgctactgcgtgaagtaccgtaagcgaatcatcttcccgtcaacttcagaagtttatgggatgtgtagcgataaatacttcgatgaggaccattctaatttaatcgtcggcccggtgaataaaccacgctggatttattcggtatcaaaacaattacttgatcgggtgatctgggcctatggcgaaaaagagggtttacagttcaccctcttccgcccgtttaactggatgggaccacgactggataaccttaatgcagcgcgaattggcagctcccgcgctattacgcaactcattctcaatctggtagaaggttcaccgattaagctgattgatggcggaaaacaaaaacgctgctttactgatattcgcgatggtatcgaggcgttataccgcattatcgaaaatgcgggaaatcgctgcgacggtgaaattatcaacattggcaatcctgagaacgaagcgagcattgaggaactgggcgagatgctgctggcgagcttcgaaaaacatccgctgcgccatcatttcccaccgtttgcgggctttcgcgttgtcgaaagtagcagctactacggcaaaggatatcaggacgtagagcatcgtaaaccgagcatccgcaatgcccaccgctgcctggactgggagccgaaaattgatatgcaggaaaccatcgacgaaacgctggatttcttcctgcgcaccgttgatcttacggataaaccatcatgaccaaagtaggcttacgcattgatgtcgatacctttcgtggcacccgtgaaggcgtgccgcgtctgctggaaatcttgagtaagcataatattcaggccagcatttttttcagcgtcggcccggacaatatgggccgccatctctggcgactggtgaagccacagtttttgtggaagatgctgcgctcaaacgcggcatcgctttatggctgggatattttactggcaggtacggcctggccaggtaaagagattggtcatgccaatgccgatatcattcgtgaagcggctaaacatcacgaagtcggcctgcacgcctgggatcaccatgcctggcaagcccgtagcggtaactgggatcggcaaacaatgatcgacgatattgcacgcggtcttcgcactctggaagagattatcggtcaaccggtaacctgttctgccgctgcgggctggcgtgccgaccagaaggtgatcgaagcaaaagaagcgttccatttgcgctacaacagcgattgtcgtggggccatgccgttccgtccattgctcgaatcaggaaaccctggcactgcgcaaattccggtgaccttacccacctgggatgaagtgattggtcgggatgtgaaagcagaagattttaacggttggttactcaaccgcatcctgcgagataaaggcacgccggtttataccattcatgcagaagttgaaggctgcgcttatcagcataattttgtggatctcctcaaacgcgcagctcaggaaggcgtgacattttgccctttaagcgaactgttatcagagacgttgccgctcggacaagttgttcgcggaaatattgccggacgtgaaggctggctgggttgccaacaaattgcgggtagtcgctgatgaaatcggtacgttaccttatcggcctcttcgcgtttattgcctgctattacctgttaccgatcagcacgcgtctgctctggcaacccgatgaaacgcgttatgcggaaatcagtcgagaaatgctggcatccggcgactggattgtgccccatctgttagggctacgttatttcgaaaaacccattgccggatactggattaacagcattgggcaatggctatttggcgcgaataactttggtgtgcgggcaggcgttatctttgcgaccctgttaactgccgcgctggtgacctggtttactctgcgcttatggcgcgataaacgtctggctctactcgccacagtaatttatctctcattgtttattgtctatgccatcggcacttatgccgtgctcgatccgtttattgcattctggctggtggcgggaatgtgcagcttctggctggcaatgcaggcacagacgtggaaaggcaaaagcgcaggatttttactgctgggaatcacctgcggcatgggggtgatgaccaaaggttttctcgcccttgccgtgccggtattaagcgtgctgccatgggtagcgacgcaaaaacgctggaaagatctctttatttacggctggctggcggttatcagttgcgtactgacggttctcccttggggactggcgatagcgcagcgggagcctaacttctggcactattttttctgggttgagcatattcaacgctttgcactggatgatgcccaacatagagctccgttctggtactacgtgccggtcatcattgccggtagcctgccgtggctgggattactccccggtgcactgtacacaggctggaaaaaccgcaagcattccgcaaccgtctatttgttgagctggacgataatgccgctgctgtttttctccgtcgctaaaggtaaattgcccacctatattctttcctgctttgcatctctggcaatgctgatggcgcattacgctttgctggcagcaaaaaataatcctctggcgctgcggattaatggctggattaacatcgcttttggcgtcactggcattattgccacatttgtggtctccccgtggggaccaatgaacacgccggtgtggcaaaccttcgagagctataaagtcttttgtgcctggtcgattttttcgctatgggcatttttcggctggtacaccttaacaaacgtcgaaaagacctggccttttgccgcgctttgcccgctggggctggcgttgctggtaggattttcaattcctgacagagttatggaaggaaaacatccgcaattttttgtcgagatgacacaagaatcacttcagccaagccgctatattcttactgatagcgtcggtgttgccgcaggtctggcatggagcctgcaacgcgatgacatcatcatgtatcgccagacaggtgagttgaaatacggccttaattatccggatgcgaaagggagatttgtcagcggtgatgagttcgcaaactggcttaatcaacatcgtcaggaggggattattactctcgtgctttcggttgaccgcgatgaagatatcaacagtctcgccattccgcccgcagatgccatcgatcgtcaggagcgtctggtgctgattcagtatcgtcccaaatgatctggctaacattagtctttgccagcttgcttagcgttgccgggcagttgtgtcagaaacaggcaacctgctttgtggcgataaacaaacggcgcaaacatatcgtgctgtggctgggactggcgctggcttgtcttggtcttgccatggtgctctggctgctggtcttgcagaacgtaccggtaggcattgcttacccgatgttaagtctgaattttgtctgggtgacgctggctgcagtaaaactgtggcacgaaccggtatcgccgcgtcactggtgtggggtggcgttcattattggcggcattgtgatcctcgggagtacggtgtaatgggcctgatgtggggattattcagcgtcattattgcctcagttgcgcaattaagcctgggttttgcggcgagtcatctgccgccgatgacgcacttatgggattttatcgcggctctgttagcttttggcctggatgcccggatactgttactcgggctgctgggttatctgctttccgttttttgttggtataaaacgcttcataaacttgcgctaagcaaagcctatgccttgctcagtatgagttatgtgctggtatggattgcttcaatggtacttcccggctgggaagggactttttcgctgaaagcactactgggagtagcctgtattatgagcgggttgatgctgattttcctgcccacgacaaaacaacgttactgagttttccctgccactttacactgccgttcccactcatcggggctataactgcttgccgagaggactttcaccgtatgcagcttttcacgattaatacaataaagcgcattctgcaaaggcgagagtaaatcccccactttcacggcgaagtcactcttcacttcggcgatcatttttatcgcgccgccagcatcgcagagcataagtacatgtctgttatcttgtttattgcagcacgattttttgaccagccattccattgcattatcctgtttgctaagagttttcacatcaatttacagattaacagataaactctttatcaacggcaatggaatggcagaaatgagaagtgaaacggagggttaattattgctgacgttgcacccactcttttagcgcctgacgtgaaattttaataccgccgtttttcagctccggcggcagagttagccagcgcaccggttgttgaaaacgggccagcttatctttcacccattcactaagatcaacgctctcgtggtcatactccatcaccgccaccggtcgatgaccaaactccttgtcggcaacggggacgataaacacctgcaaaaccgcaggatgtgcagcaattacgcgctcgacttcttccggctgaataccctctccgccactgaagaatagattgtctaaacgtccgacaatggtcagcttgccattatgcatctcaccgcgatcgcgcgtagcgtaccagccttcgtcattaaccagtgaaaccagttgcccgttacgccagtaaccttctgccatactggcagcccgcagccacacttcattattaacgattttcacttcccgacccggcagcggcgaaccaacgtctgccaggccgtcggcttctttcgcacacaccgtggaggcaaactcggtcagaccatagccgcaaaagcaacgaatcccctgctcgcgcgcctgttccgtcaactcgaccgggatagccgcgccgccaagtaacaccgctttcagggaaacggaactacggttaaccagcaaacgccagagttgtgttggcaccagtgaagcgtgagtacagcctgccagcatttgctccaatggctgtttatcacgtaccgtcatccgcgcaccagcgtataaccagcgccacataattccctgaccggagacgtgaaacagcggtaaagagagcaaccaatcatcgtgatcgccaaacggaatcagcgataacacaccttgcgcactggcaagatgggcctgataagtatggacagcggctttcggcaaaccggtagaacccgaggtcaacgtcattgagcacagacgcgtcggctgccacgtagcggcatgtgcgccttcaaccagctgaatgtgcagcgacgttaatgccggaaacgtgttttccccatccggcaccagagcaaattgcagcgtcagattgggcagcaattcttcaagcaacggttgcggcagctgagggttcacgggcaacacccgcgccccgcattgcagtaacgccagccaggcgagcagcgtttgcggcgtattccacgcccgcaacatcacgccgctgccctcaaccaccccctgcaccgcaaatccggaggctaattcatcgacgcgagcacaaagctcgcgccagttgagttgctcgtcattaagacgtaaggcgatggtttctccccgcacttgccgccagtgacgccacggccagtcagagaagatcataacaaccgctccagtgcatcaacttccacgacaggcagcgtgctacccggccagcgacgtacctgctgcgcctgcatcagatccagcgtgtccagccctggaatggtgtccggcgttaaccaggcggcaatccgcgccagttgcgttaagcctaagctcgattcaatggaagaactgatcaccgccgtcagccccagcgcgtgcgccgcctgtacctgctcgcgtactttttccagactgcccgtgagcgtgggtttgataactaccgcgcgcacgccctcttcagccacaaaggcaaaatccggctcgcgcaggctttcatcccaggcaatggcaatgccggtttcacgggcaaacgctcgcgaatcatcgcgggttttgcacggctcttcgagaaacgcgatgcggtcgcgataatccgggttaacgtatttggcaaactgctgacctttcagcggtgtccaggcgcgatttgcgtcaagacgcaaatgcagatccggaattgcctccagcaacagattcaccaccatgccgtcgcgcaccgcttcgtacaatcccactttgaccttcgccactttctcgcctggcatatctgcaagtttgaggatcagatcgtccggatcgccattacacagcggtgccgcacggtagttggctgcttgcggcaacgtatctgtcagttctgccaatgcacagcttacgccaaaggccacggaaggcatctgcggtagctcgcaatcgcctgccagccagttatttacccaggcaagcagcacactttgcgcctcttcccaggtttcctgactgaagcccggcagtggggagatctccccccacccttcgcgctcgccttcacgcaggcaaacatacagcccgtcgcgggtttttaaccgcctgtcgcgcagaaccacccccgcgtccatggggatctgccagcggtatacctgcgcgctacgcattacggattccgtttgaatttgctgaagtcaggctgacgtttctggttgaaggcgttgcgaccttcctgaccttcttccgtcatgtagaacagcatggtggcgttgcccgccagctcctgcagccccgcctgcccgtcacagtcggcgttcagtgcagctttcaggcagcgcagcgccatcgggctgttttgcagcatttcgcggcaccaacggacggtttctttttccagatccgccagcggtaccacggtgttcacaaggcccatatccagcgcctgttttgcgtcgtactgacggcacaggaaccagatttcacgcgcttttttctgcccgacgatgcgagccatgtaggaagcgccccagccgccgtcgaaggaaccgactttcgggccagtctgaccgaagatggcattatctgccgcgatagtcaggtcgcacatcatgtgcagaacgtgaccgccgccgatggagtagccagccaccatcgcgacaaccggtttcggacaggtacggatctgacgctggaagtccagcacattcaggtgatgtacgccggaatcatctttatagccgccgtaatcaccacgcactttctggtcaccaccggagcagaacgctttatcgcctgcaccagtcagaatgatcacgccgatgttgtcgtcataacgcgcatctgccagcgcctggatcatctcttttaccgtcagaggacggaaggcattgcgcacctgcggacgattaatggtgatttttgcgataccgtcggtggatttttcataacgaatgtcctcgaaaccttcggagcagtcgtgccattcaaccggtgcgtaaagcattgcttcatcaggataaatcatattgtgtcctttagtcagaaacgcaagatctgcgccagacttgcgattacgccagcgggattttcccgatgcgcgttatgtccggcgcgaggaatgacatggcagtcggcagccagttccgccgccagggcgcggaatttgctgtcacgttcaccacataaataataaaacgcaaatgtgcgggcgctaaggttagcacgtaaatcaggctggacggcgagagaagtcgcctccagcatggcggcaagcgttgcgccattattgttgctgcgcagcgccaccagctcccggcgttgatcgtcattgagtgaggcaaaaacaggctgttgataccagtcggcaaataccgccgttaacggttctgtgagaaaacgctgcacccattggcgatcggaacgctgacgttccgcacgttgttcagcattttgcagccccggatgcccgccttcgacaataaccccacaaagccccgccagcccctggcaagccgccatcatcgccacccgtccaccaagcgagtaccccaccagccagaagtcaaggatgttgtaactaaccaaggttttacgcagtaagtcggtgacatcatcaaatccatcgacgctaatcgccgccgaaccaccgtgacctgggagatcaacatacaaccgtgagtagtcggcaaacgcctcgcccacttcttgccattcgtggcaatcgccggaaaaaccgtgcaaaaacaccagccagggtaaacctggttttccgtgttttgcctgcgcgtgcaggatcataaatggcttacctgcgccagaagttgctggagcgtttgcgcaccatcggtgtcgttaaccaccatttcaatcaccgtggtggttggcgtgcgccaggcgtcggcaaatgccgtttcaagttcctgccagttttgcggacgatgatatttcagctcgaacatcgcggcggcgtgctcaaaatggacgttttgcggcatcagatagaaacgctcacgctcgctttgcggcgttggcaacagcgagaaaatttgcccgccgttgttgttcaccacaattaataccagcggcgcagaaacctgacgcaataacgccagcgcgttgagatcgtaaagtgcggagagatcgcccacaatcgccagcgtcggtttgccgcttgcccgctgaacgccggcggcggtcgaaagcagcccgtcgataccgctggccccacggttgctgtacaccgggtaacctgccggaagttgcgaaagcgcatcaatcagacgtaccaccaggctgttaccaacaaacaattgcccctgttcaggcagatagtcgcagatgcgatgcgccagttgcgcttcgccaaacgcatcacggcgggcaataaccgcctgcattgcctgttccgccaggcgcgggatttcaacgcaccagggctggcgtttttctgccggatgcagctccagccagtcggcaatattggcaattaagcgacgtccgcgatggtgtgccggatcaagtcgcccttcaatgtcatcaacaatccagtactcttctggttcacagcttgcctgccattgcaggagccgtttccccgtcaggctgcttcccagttgcaccacaatttgcgcctgctgcagctcgctggtcgctttggcattgcctaaccaaagatcggcacacggcagcggctgcccggtttgtgacagcacatcgccaatcagcggccagccaagagtttgcgcccacagggcaacttttttgccctcttccgcactcatgcgcccggcaaccaccacgccgcgcttttgtcgccagaagaaccagtcgcgctgtttttcactttccagacgaggcgcttcacgcagccacggtttgtcgtcctgccaccagtcacccagacgctgttgccagctaagcccggtatcgtccatttcgccatacagcggttcagcaaacgggcagttgatatggactccccccgcatgaagcgtaccgagagcgtggtcgatggtagaaaccagccaacgtgcggggatatcctgggtcgggcgcggcaatgaaatactgtgcgtggggtgagaggcgaacattcccggctggcgaattgcctgattcgcgccgcagtcaattagctccggcgggcgatcggcggttaagagaatcagtttttctccggttaacccggcttcaatcagtgccggatagagatttgccaccgccgtgccggaggtcacaatcaccgccaccggctgcttgctgactttcgccagccccagcgccagatgccccaacccacgctcatcgaaatgggtgtggtgaatgaatgcggaattctccgccgccgctaacgttaacggtgtagaacgcgagcctggggcgatacagatgtgtctgacgccgtgacgcgttaatgcttccagaatgaccgccgcccagcgtcggttaaatgcgcttactgacatgagtttgtccggtatcaatattgcggctaagtataaggagctacaaaaatagattattgatatgaatcggtaatgatgcgactcattactattccatttgtaataaagtacgcagccctgccgctttgttgtcgatttcctgccactcttgctcggggtcggaaccacggacaatgcccgcgccagcatataatcgcacgacattgccgctaatttttgctgagcgcagggaaacgcagaattcgctttgttgtaatgagagatagcccgcagaaccggcgtaccattctcgggtgaacggttcgtgacgggcgataaactgtcgcgccagatcgcgcggtaagccagcaactgctgccgttggctgcaactgatgtaaacagatcacatcatccgctttgttgagtgaagtccagatacagcggcgaagatgctgcactttacgcagacgcagtacctgcggcggtaaaacatccagcgtctgggtatcggcctgtaatcgttgacagatatcttccaccaccagcatgttctcgcgctggtttttatcatccgccatcagccactctcctaactgctgcgcctgcttatcatcaggattatttgctactgttcccgccagcgcttcagtacgcagcgctttgtcacgccgccgccataaccgttccggtgaagagccaagaaaagcattttcgccatcaaaggccatgtaaaaatggtagcaattcagattcagtcgacgactggcagccatcatcgccgccgcgttgaccggacttgcgaaatgcaggtcagttgcccgagcgagcaccactttgtcgagctcaccttcggcgatggttttcgttgccagttcgattaattgcgtccagcccgttttgtccggccagtgttgttctcgcgtggtggttaaatgtaacccaggcaagggcttgatactcaccagtgtggcgataaattcttttgcctgaatcgcatcgtgctgaagggagctttcgctgaatagcgtcagccgcagcgtggctttaccgccacagcgtcgccattccaggcggggtaaaagtaaattgccctgcgacgggtcaaaagcattcagcccccaaatgcgtaagtcggcgtgttccgggtgctggcgaagaaaacgttgtgcctggtccaacgacgtaaaacgggtaatcgcgcccaggacgacagcttcttcatcaccattacgttgttgccagtagaattgcgggtatgtttgctgactggccagccagctcaaggcatcaaaagcgtctttgagagggaaaggaatatcgataacccgaatgccgggtgtcgccggaatctcttgcgacaaatggcgcagtagattttccagcgccgtagtaagtgattgcacgcggacctctccctgttaaaagcctcacattatacggggtactacaaaaaaaatgcagtaccccggtgtagggaggttttaacggcgtgccagcaacagtcctagtaccagcccaacggccgcgcccacaccaattccttgccagggtttttcgtggacgtagtcatcagcacgataaactgcctgcttcgcccgatagtaataactgtctgaagcctggctaacccgttttttcacatcatccagcgctttttctgcacgcgctttcagctcaacatatttctgatcggcgggatcgccagaggagcggagcacctcttccagtgtttcactaagcagcgtcaggtcgtcatcgatacgtgtatcaccaaactgattagacattctcgttctccatttgcgtaaaacctgtcactaactatagacaagggttgttgattacgcctgaattacctcgcgtgccatcccaatgtgtgggataccatcttcttcatagacctccgtcacagggataaaaccgaaactctggtagaagttttgcagatgcgcctgcgccccgaggtaaacaggcttatcaggccagtgatgcgtacatgtttcgagtgttttactcatcagctgctgccccactttttcgccacgcaacgcttcactgacaatcacccgacctataacgaccggctcaagatcatcatcacttttcagaatcctcgcatacgccaccagttcatcatttttccaaccgagaatatggcgattatcccccgtcaaatcatcaccatcgatatcctgataagggcaattctgctcgacaacaaacaccgcgcaacgcagttgtaataaggcataaagctgggaaaccgataattcagagtgatgcagatcttgccattcaatcataatgctctccttttagatgtatgccttatactagccggaatattttttgaaacgtgatgaactcatggaattaatttttttaggtacttcagccggtgtgccaacccgcacgcgcaatgtcacggcaatattgcttaacctgcaacatccgacccagagcggactttggttgtttgactgcggtgaaggcacccagcatcagctactgcataccgcctttaaccctggaaaactggacaagatttttatcagtcaccttcatggcgatcatctttttggtttacccggcttgctgtgcagtcgttctatgtcaggcattatccaacccttaacgatttatggtccgcaaggtatccgtgaatttgtggaaaccgcgctgcggattagcggctcatggaccgattatccgctggaaattgtcgaaattggcgctggcgaaattctcgatgatggcctgcgcaaagtaaccgcttatccgctggaacacccactggaatgttatggctatcgtattgaagaacatgataaaccgggtgcattaaatgcccaggcattaaaagctgctggcgtgccgcctggcccactgtttcaggaattaaaagcgggcaaaacaatcacgctggaagatggaaggcagattaacggcgcagattacttagctgctccagtgccaggtaaagcgctcgctattttcggcgataccggcccctgcgatgccgcacttgacctggctaaaggtgtcgatgtcatggtgcacgaagcgacgctggatataaccatggaagccaaagccaatagtcgcggccatagctctacacgccaggctgcgacactagcccgtgaggctggagtcggcaagctaatcattacccacgtcagctcgcgctatgatgacaaaggttgtcagcacctgttacgtgaatgcaggtcaattttcccggcgactgaactggcgaatgatttcaccgtgtttaacgtttaactctgcttattattaaaaacagggcgaaacttgccctgttatcgcaacccgcgctacatatatccacccacacaggcatattgagcgatttttgatatttattcatctccttacgcactatattcagagcaataagttgcctcttttcatcttgattcagcacaacctttgcaactaaaaggagcccatgatggttacagttgtcagcaattattgtcaattatctcaaacgcaactcagtcagacatttgcagaaaaatttactgtgaccgaggaattactgcagtctttaaaaaaaacagcgttatccggagatgaagaaagcattgagttactgcataatattgcgttaggttatgataaatttgggaaagaagctgaagatattctttaccatattgttagaaccccaacaaatgagaccctatcgattatccgacttatcaaaaatgcttgtttaaaattatataatctggcacatatcgcaaccaactcccccctcaaatcacatgattcagatgatctcctgttcaaaaaactattctccccttcgaaattaatgacaattatcggtgatgaaattcctcttatatctgaaaaacagtcgctttcaaaggtgcttttaaatgatgagaataatgaactgagtgatggtacaaacttctgggataaaaatcgtcaattaaccacagatgaaatagcttgctatcttcagaagatcgccgctaatgcaaaaaatactcaagtcaattatcctactggtctctacgtcccctactccaccagaactcacctggaagacgctctcaatgaaaatattaagagcgatccatcatggccgaatgaagtccagttattccccataaatactggcggacactggatattagtttcgctacagaaaatagtaaataaaaaaaataataaactacaaataaaatgcgtcatattcaactcattgcgtgcactaggctatgataaagaaaattcacttaagcgtgtcattaatagttttaattctgaactcatgggagaaatgtcgaataataatataaaagttcatttaaatgaaccagagataatatttttacatgccgatcttcagcaatacttaagccaaagttgcggtgcatttgtgtgcatggcagcccaggaagtgattgaacaaagggaaagcaattctgacagcgccccctatacgttattaaaaaaccatgctgacagatttaaaaaatattcagcagaagagcagtacgaaattgattttcaacatcgactggcaaacagaaattgttatttagataaatatggcgatgcaaatatcaatcattattatagaaacttagaaataaaacactcacaacccaaaaatagagcatccggcaaaagagtgagttaacatcattgttaattaattcgaccagtcagcaaatatgctgactggtcgaacatagtttgctaaacagtcatcactgactgatgtcagtcacaccatccgccagttcaatcaggcgaataaattccgccctgtaaccctgtggatcttccccttttgcctgctgagcccactgtttgatctgctgccaggaggtattgttcaggtattcagaaccgcgtaacttttgcccatatgcagctactgctgcgcgaaaacgcatatcttcagagggcgcgtttattgttggccccagcgggaattcaactaactgactttcttttccctgcgggtatttccagcgaatttttaaccaggccagttctttcgttttgtccgatttcgctaatttgttatccggggcatagcgtaacttatcaattgatgctttttgcccgttcagcgttaattcgaataacaacgttatatgtttgcctgcgcctatatcccctgcatcaacgttgtcgttattaaaatgttccacccgaagttggcgcttttcataaccaatctgacggtattccgttacccacgcggggttaaactcaatttgcgctttgacatcttttgctacggtaatcaacatctgccgcatttcactattcaatactttctgcgcttcagagagggtatcaatgtagctgtagttgccgttaccaacatcggcaattcgcaccatcattgcctcgttgtaattgctattccccacgccaaacgtcgacagagtaacaccagactcccgctgttttttgaccattgattcaatcgattttggatcgtcaatgccaacgttaaagtcaccgtcagtggctaataaaatgcgattgatgccgcccttaataaaccccttcgtcgcctgctgataagccagttccagcccggcaccgccattggtactgccttcggcatccagcgaatcaattgcggcattaatttccgccttatgactcccggagatagaaggcaatgcaatacgggagtcgccagcgtaggtcacgatggcaatgttatcctgctcacgaagttctttgaccaataatttcaacgaagactggataagtggcaaacgttcatcagaaatcattgaaccagaagtgtcgataagaaagaccagattagaagctggtaactcttcacttttgcgatctttcgccaggatatcaactttcagcaatgttcgctgttcattccatggtgcaggtgccaattcgtagcgcatagcgaaaggtattggcttagaggccggaatagattgtttgtctttgatatcccaatcagacgggaaataattgactatctcctccacccgcacagcgtctggcggaggtaacagcccttgattgaggaaacgccttacattcgcataactgccagtgtcaacgtcaagactaaacgtcgccaacggattttgcgctacctgcttaaccggattatcatcgaactgctggtagcgagcggttcctggatttgcgatatgtgtagcttttgctttagccgctcttgcaaatgttggcgcttcctgcaatcgcccctgtaaagcctgtttgtctgaatattgttgcacttcttgctgggccaaggctttcgcggcggcggcgctttgctcagcctcttttattgcagcttgctgcgcggcaagcacttgctgctctgtgggagtactgggttgttgttgctgactttccttattctcaggttgcggcccacatcctgacaaaatcaaactactcataagcaacatgattatatttttatttcgcatataaaatccttttaaataaactcaggcaccagacataaaatatactctttgtataatcctgctaatcttaataaaatacaatatcgaaacccatagcaaataatgattcaacaacgcaacccattaataatttgcatatgaaaaaaataatctttgcttttattatattatttgtgtttttactccctatgattattttttaccaaccctgggtcaatgcattaccgtcaacgccccgacacgcaagtcctgagcaattagaaaaaacagttcgttatcttacacaaactgtgcatccacgtagtgccgacaatattgataatctgaataggtccgcagaatatataaaagaggtctttgtcagtagcggtgccagagttacctcgcaggacgtccccattacgggtggcccctacaaaaacattgttgctgattatggtcctgccgatggaccgctgattattattggtgcgcattatgactctgccagcagttatgaaaacgatcaattgacctatacgccgggcgcggatgataacgccagcggtgtggcaggattactcgaactggcacgtttgttacatcagcaagtaccgaaaacaggcgtgcagctggtcgcctatgcgtcggaagaaccgcccttctttcgtagcgatgaaatggggagcgcggtgcatgcagcttcgcttgagcgtccagtgaaattaatgatagcactggagatgattggctattacgactctgcgcctggaagccagaattacccttacccggcaatgtcctggctttatcccgatcggggagactttattgccgtggtcggcagaatacaggatatcaacgccgttcgtcaggtaaaagcggcattgttgtcatctcaggatttatctgtttattctatgaataccccagggtttattcccggtattgatttctctgaccacctgaattattggcaacacgatattcccgccataatgattactgacaccgctttttatcgtaataaacaataccacttgcccggtgataccgcagacagattgaattatcagaaaatggctcaggtagtggatggtgttataactttgttatacaacagtaaataataaaaatttctcgaggcgggtccagaaaaagcgacatgcacattttattttccctcatctgttttaagatgcgaaacatgaaattcaacggaggaaaaataaatgggaatgattggctattttgcagaaattgactcagaaaagattaaccaactgcttgagtctactgaaaaacctttgatggataatatacatgacacgctttcaggattacgccgactggatattgataaacgctgggattttttacactttgggctgacaggcacctctgcttttgatcccgcgaagaatgatccgctgagtcgtgccgtgcttggtgaacacagcctcgaagatggcatagatggcttccttggattgacctggaatcaggagttagccgcgacaatcgaccgactggaatcactggatcgaaatgaactgcgtaaacagttttccattaagcgactcaatgaaatggagatttatccgggagtgaccttttcagaagagttagaggggcaactctttgcctcgatcatgcttgatatggaaaagctgattagcgcgtatcgacgtatgctgcgacaagggaatcatgcgctgacggttattgttgggtgatatagcttgatgcctgggggagaaagacccattagttaagatttacgccaggatcatcttgaaaaaatctttaaccatggtccggtttttatccccttgtataaatattactaaatgcttgcttagtcgcattgttaaatgcaataccgtatattcggtatgtaacagcgatatcctctgtgctggcaacgatctgtcatgcttgatgaaaacggaattgaacctgtcattaccaggtagataaaaagcctgttcaattttgggattattttttataactcgtgtctgttatggcgacacgggaaaacatcaatattgtccttcacaaattgcagtaatatagaatcaacctctcttgcaagttggtcacaatgtattataagcattttgaatatgtcatcctctgtaatctcgtgaaaattttcggccttgtcttttagctcatcatatcggattcttgcagtaaccattttttgggcgagttctaataaccccaaagcttgcaattgctggtgagtatgatcactttcaaaaaatatcccacactccattccttcccaaccaacatattcatgccattcataaaccagcataaatgtttgtaaaactggcggtaataattggatatctgcaaaaccaaaccaaaacttacgcttgagatcccactcatattcaatcgccaatgctatattgtttaaggcatctccggcatccttatttttacgcaaaatcaattccgtcagtgtatagcgttgttcatcaatacgccgaagagcttctgcaatatcatagtttgtagccaacaaaacattctctgcttcctgatgagtgacgtctgcttttgccgtcaatatattgatttggtcaatatgaaacaacttgatggcttcatcaacatcaccgccagtcctctctaacaaacgtctggcaacctggataccgacaggtacgttcttccgaagtttacgaatttcacttaaccattccatgtcaaacccctttaaatatttatgatattaaatataacaacgtctggataacgacccggcctgactgaatatctcacgttttcctgcttaacattcatgttatgatgctcttgaaactaataatacgtatggaattgtcactatttatctgctaatgaattcaaacaatgtcattcgtttgatgaatatattatttcagggaataattatgacacctttagaacgcattacccaacttgttaatatcaatggtgatgttaataatcctgatactcctcgtccattgttatctcttgaggatttttttattgacaataatatccatggttcaatatgttgcaatgtgattccagaacaatctccgcaagctatctatcaccattttctgaaaatacgtgagcgtaacaatgttagtgatgttttggtagaaattacgatgttcgatgacccagactggccctttagtgaaagtattttagttatcaccactgcttcaccagaagaagttcagagctggtttgtagaagaaattgcccctgatgagtgctgggaaggatggtcagaagatacggagcatggatgggttgaagtccctgtgggtatgcatccggttacttgttggtgggattaaaacatttatataaacagataagcggatgtttacataaatttttatgtgaaggaacatgatgaaacttattcctcgcagtagtgatatttcacctggcattgatggaatttgcccggggccttttcctccgaacggatttaccgtacttacagatgcagcatatggtaacggagactgtttcggtttgtactggcctattggtcaggagcataaactacctatagtgtgcgaaacgtaccatgacgaatggcgaatcgtacctgccttttccagcattaagaagttcgaagaatggctggaagtgaatgatgatgatccccatgaaaatggcatcagcatcgaagatcaagactttgcagcaaatctcttccgtgttgctcggaaatgtctttcaacgggaaggcttgatgacgcactgccactgttacagcgagcaacagaacaattgcctgaagtcagcgaatattggttagcactggcaatccagtatcgccgatgtaaaaaaacagaagctgcagcacaggctgcgcttaatgcttatcttggcaattgggcatttggtgttcctgacaataaagtcattcatttgctgtcacaggccgcagatgtcccgaatttccaggatgatcctgtgattcagtgcattaaagaacaaggattagatcttagctttggaggaacaaaggaaaataataattaccccttgatgcagatgtgtgttgatacttattttgcgcagagaaaaccgcttcaggcattaaccctgttacataattatgcctggataatgtccagtgaaacgactgcatttcaggaacgctatgattttaatatcgatgaatggcgggcaaaattcaggcagttatgtttagagtattttggcgatagtcgtacacagttcacttaacgctctgcgtctatctactatcccttctttttcagaaaaaccgccgagcatgtcggcggctttctgacttacaaagtaacagattacatcagcggcattgccaaacgcacaatgctaatcagcggttgtggccatacacccagcaccagtaccaacagtgcagagatcagcacaacgataccgcccgcgctgtactgccagtttgatggtgcatcgcgacccggttgttccggggcgtgaagatacaggctcaccgccacgcgcaggtagtagtagaggccgattgccgaaccgacaaccacggcacccaccagccaccacaagtgtgcctggacaccgaccgccagcacgtagaacttaccgataaagcccagcgtcatcgggataccggccagagacagcatcatcaccgtcatcactgccgcgaggatcggacgatgccagaacagaccgcggtaagagaacagggaatcagcatccgggccacgatacgggctggacatcaggctgaccacgccgaacgcgccgaggctgctgaacagataaccggccaggtaaacccctaccgcttccatcgacatctcgccggtttgcagcgcaatcagcgctaccagcagatagccgaggtgagagatagatgagtaaccgagcagacgtttgatattggtctggctcagcgccatcaggttaccgaagatgatggaggcaaaggcgataatcgccagcaccacgcgaatcgcttcgctgtcacccaccggtgcgtagaggaacagacgcatcaccacaccgaagatagcgattttgctcgccgtcgccaggaaagtggaaaccggcgcaggcgcgccctggtatacgtctggcgtccacaggtggaacggcaccagagagagtttgaagccgaggccaacaatcatcaggccgaaacctgccagcaacagcggctcgttgagcataccgtcgccaaggtttttacccaacgcgacaaacgacaggtcgccagactgcgcatacaccagcgccataccaaacagcaggaaagaagacgctgcggcagaaaggatggtgtatttgatactggcttccagtgaacgtttctggcggaaagcgtaaccgaccaggccaaacagcggcaaagagatcagttcgataccgaggaacagagacgccagatggttggcattcgccagcaggatcccgcccagcgcggcaattaacaccaacaggtagaactcatccttgttgtcgttatagccttcaagccacgggtaggcgaaagtacaggtggcgaggctcgccaacaataccagcccggtgtaaagcatggcgaaaccatcaacgcgcatcagcggcgtaacgtccatagcgcccgcctggccaacaaaccagagcgaaaccagcgccgcgttaagcccaataaccgagagcgtagcgttgaggaaatgattgcgtcgccacgcaatggagagcatcacaaccaccaccgtcaagccgacgatcagcaacggtagcagtgcgatcaggttttgtggagttattgtcatggcgatttacggccttgtagtagtaacggaattaacaaaccactgctggatattgccaatcgcggagtgcgaggtatccagaatcggctgcggatagaagcccagcagtaccagcagcaccaccagcaacaggatcataaacagctcacgcagcgacatccctggcagttcctggctggcaatctggcttttcgctttaccgaagtaagcgcgatgtaacatcgccagcgaataaacagatgcaaagaccagcccaaaggtagagataacggtaatcaccggtacaacctggaagctgccgaacagaatcataaattcgccgacgaagttaccggtgccaggcatcccaagcgttgccaccgcaaagaacagcgacagtgctggcagccatttcatcttgctccacagaccgcccatcatgcgcatgtcgcgggtatggatacgttcataaagctgaccacaaagaataaacagacccgccgccgacaaaccgtgcgcaatcatctggattaccgcgccctggtaggccaactggctgccggtgtagatagcaatcagcacgaagcccatgtgggaaaccgaggtgtaggcgatcagacgtttgatatcggtctgggcgaaggccatccacgcaccgtagaagatgccgataacacccagccacatagcaattggcgcgaactctgccgacgcgttcgggaacagcggcagggagaaacgcagcaaaccgtaagcggcagttttcagcaagatccccgcgaggtcaacggaaccggcggtcggagcctgggagtgcgcatccggcagccagccatgcagcggaaccaccggcattttgactgcgaaggcgatgaagaagcccagcattaacaggtattccacaccactggacattggcgtattcagcagctcttcatagttgaaggtccagacgccggtcgcattgtagtgaacaaaaaccagcgccaggatggcaatcaacatcaccaggccactcgcctgggtgtaaatgaagaacttggttgccgccgtgatacgcgttttaccgtcagaggctttatgcccccacagtgcgatcaggaagtacatcggcaccagcatcatttcccagaagaagaagaacaggaacatgtcgatggcaaggaacacgccgataacgccgcccaggatccacatcaggttgaggtggaagaagccctgatatttttcgatctctttccacgaacatagtaccgccagcacaccgagcagaccggtcagcacgaccatcagcagcgacagcccgtcaatggcgagatgaatagagataccaaaacgcgggatccacggcatgtcgaattcagactgccactgcggaattccggcggattgcgtcagtgaataaccgccctgcaaccacagttgcagcgacagcgccagcgtcaatcccatggtgatcagcgcgatccagcgtggcaccttgacgccaaagcgttcggtctgccagcacaggaagccgccaataaagggaattaatattagccagggtagtaacatggcgatctttattccttgtaaaagtcccgtcaggaccggattttcaacgaattctcacgacagaaaattctcttcggactgggggtagtgtcggatgcaccgcgaaggcggcttatccgacctacgttcttatatgcccaggggcaatcccacaatccttaactcaacgcagtaccatcaacagtgccagcaccacgaccgcaccgatgctcatggatgccacataccagcgcagatagccgttctcacttaacagcagacctttacctgcaaagcgggaaaggacagccgggatgttcatcattgagttcagcggatcgcgtttcagcaaccaggcaatacccaggaacggcttgacgaacactttgtcatacagccagtcaaatccccaggcgttgtaccaccaggtgcccagcagacggcccggcgcactgttggcgatggaggtcaccagagtacgtttacccagccacagccaggctgccagcagaatgccgaccaccgcgaccacgccagaggtaatttccagggtcaacatgctgccgtgcgccagttccgtcgtttgcggaagcacgccctgcagcggcggtacaatcagtgcgccaacgaaggtggaaaggatcagcagcacaatcagcggcaggctgtgagttacccctttcacggcgtgagcgtgaatttgttcttttccgtggaagacgatgaaaatcatacggaaggtgtagagcgaggtcataaacgcaccgaccagacctgccaccatcagattgatatgaccattcgccatcgcacccgcgaggatctcatccttactgaagaagcccgcagtgaccagcggtagtgccgacagtgctgcgccgcccaccaggaagcagagataaaccagcggaatagatttacgcagaccgcccatcttgaagatgttctgttcgtgatggcaggccagaatgacggaaccggatgccaggaacagcagcgctttaaagaacgcgtgggtcatcaagtggaaaatcgccgcatcccatgcctgcacgccaagcgcgaggaacatgtagccaatctggctcatggtagagtaagcgagaacacgtttgatgtcggtctgtaccagcgcggcaaaaccggccagcagcagcgtaaccgccccgacaatacccaccagatgcagaacttccggcgtcatcaggaacaggccgtgggtacgggcgatcaggtagacacccgcggttaccatggttgcggcgtggatcagcgcggagacaggcgtcgggcccgccatcgcgtcggcaagccatgtctgcaacggcaactgcgcagatttaccgaccgcaccgcccagcagcatcagcgtcgcccacatcagcatgttattgccgtcagcaaagtgcgctggtgccagttccaccatttcgcggaagttcagggtgcccagttcgttgtaaagaatgaacagtgcgaaagcgaggaacacgtcacccacacgggtcacgacgaacgctttcattgccgctgcgccattcttcggatcggtgtaatagaacccgatcagcagataggagcacaggcccacgccttcccagccgaggtacatcagcagcaggttgtcggcaagcaccagaaccaccatgctggcgatgaacaggttggtgtaagcgaagaagcgagagtagccctcttcaccgcgcatataccaggaggcgtacatgtgaataaggaaacccacaccagtgaccaccgagagcatggtcagcgacaggccgtccagcaccaggttaaaaccgatgttaaagtcgcctaccgacatccacgtccacagcggctggctgtatgtctgctcgccgttagcgaagaaatcaacgccgataaaggcggttaccagcgccgccaggcccacagagcctacgccgacgatcgccgagacgttttcagaccagcgcccacgggagaatgccagcaggacgaagccaatcaatggcaaaataatggttaaggcaagcatgttcatccgcgcatctcacttactgaatcgatgttcaggttctggcgacgacggtgaagttgcagcagcagcgcaaggccgatactcgcttctgccgccgcgaggctgatggcgagaatgtacatcacctgaccgtcggtctggccccagtagcttccggcgaccacgaaggccagcgcggaggcgttaatcatgatttccagaccaatcaacataaacagcagattgcgacggataaccagaccggttaagccaagaacgaataagattgccgcgaggatcagtccatgttgtaaggggatcatgcgtgctcctccgtttttcttttcgcgctgtcgtctttacgattgctcagcacttcacccgcacgctcttcacgaccgacgtggaaggccacaaccagacctgcgagcagcagcatagaagccagttccaccgccagtacgtaaggcccgaacagcgtaatacccactgctttagcactgattggcgtaccgtcgataccctgatcgttaacaccgaggatggcgtaaacaatcaccaccagcatgatggccgacaaaattgccggaccaatccacacctgcggtttcagccactggcgttcctgttcgatttctgaaccgcccaggttgagcatcatcaccacgaacacgaacagcaccataatggcacccgcgtagacgataatttccagcgcaccggcgaagtaagcgcccagtgagaagaacaccccggaaatcgccagcagcgaaataatcaggtacagcagtgcgtgtaccggattggtatgggtgatcactcgcaaggtcgcaagtatggctatcaggccacagatataaaaagcgaactccattgcccctctccttacggtaacaggctcttgacgtcgataggcttggcttcgttctctgcttcgcccttatctttgccgtcgattgccatacctgccatccggtagaagttatattccgggtatttgcccggaccggagatcagcagatcctctttctcgtaaaccagatcctggcgcttgtattcccccatttcgaaatccggggttaactgaatcgccgtggtcggacaggcttcttcgcacagaccacagaaaatgcagcgtgagaagttgatgcggaaaaattccgggtaccagcgaccgtctttggtttctgctttttgcagcgagatacagccgaccgggcaggctaccgcgcagaggttacaggctacgcaacgctcttcgccgtccgggtcgcgggtcagaacgatacgaccacgataacggggcggcagatagaccggctcttccgggtacattcgcgtttcgcgtttggcgaacgcgtgcaggccgatcatccagatactacgaacctgggtgccgaaacctactaacaattcttttaaggtcatggtcttattgccccttattgcgcctgccagagaatgacagccgccgttaccagcaagttgatcagcgtcagcggcaggcagattttccagccgaaggacattacctggtcataacgcggacgcggtaacgacgcacgaatcaaaatgaacatcatcataaagaacgcggttttcagcgcgaaccagatgaatggcggtaacaacgggccttgccagccaccgaagaacagcgtcaccatcaatgcagagatggtcacaatcccgatgtactcacccacgaagaacagaccgaacttcataccggaatattcaatgtggtaaccatccgccagttcctgctcggcttccggctggtcaaacgggtgacggtgacataccgccacgcccgcgatggcaaaggtaataaaaccaaagaattgcgggataacgttccacacatgcgcctggctgttgacgatgtcggtcatgttgaatgaaccggcctgcgccaccacgcccatcaaggaaagcccgaggaacacttcgtagctcagggtctgcgcagaagcacgcatcgcacccagcaacgagtatttgttgttacttgaccagcccgcaaacagcaccgcgtaaaccgccagacctgccatcatcaggaagaacaaaatcccgatgttcaggtcggcaaccacccaacccggactgactggcacaatcgcaaaggccagcagcagcgaggtaaaggcaatcatcggtgccagggtaaagatgacgcgatccgagaatttcgggatccagtcttctttaaagaacattttgatcatgtccgcaaccagctggagcgaaccgccccagccaacacggttaggtccgtaacggttctggaacagacccagcaggcgacgttcgccaaagctcatgaatgccccgcaggtgacaaccaccagcaggatcaccaccgctttgaggatggtcagcaggatctcaatcagttccggtgatatccaactcattgttgtgcctccttgagatcctcaagatgcgcgccagccagcaccggagcaatgccggacatacccatcggcaagcccacctgccctgccgtcagtccttcggcgatttcaaccggcagcgtgaccgtgttgccatcgtaactaaaggagacgcgtgtacctgcgttcacacccaacttcgcggcatccgctgggttgagtttgatgtacggctgcggcatacggctctggaagaccggagcacgctgtgacaattcatcgctgccaaacaggtggtaatacggcgcgatacgccatttcccgtcctgcggctggaagcgtgccggtacgctggtgaagtaatccagaccattttcgctggtttcaaacagacgcacgcccggatcgccaaagcgcagtttgccgcccacttcgtcctggaatttgttccacgcctgcggggagttccagcccggcgcccaggcaaacggcacttgcgaacggtgcgcagtcggctggttgttaccttccatcgagaaggtgaacatggtgtcaatatcctgcggctgacgcggctcatgaacgctgatattggcgcgcatggcggtacgaccgctgtaacggtgcggttcacgggccagtttctgcccacgaatacggaatgtcgcatccggcgcagcatctttgatacctgccagttccgggattttcgccacaacagcgtcaatcacatggtcgagctgcgtccagtccacttcacggctcagcagggtgctgtgcagcgagtgtaaccagcgccagctttccagcatgacagttttgctgtcgtaataagcaggatcgtaaacctggaagaaacgttgggcgcggccttcgttgttgatcaccgtaccgtcgctttcagcaaagctggcagcagaaagtaccagatgggcgttttccataatcgctgtgcgttgatgatcaaccaccatcaccagcggtgctttagccagcgcagcattcacgcggatagcagaagcgtgacgatgcagatcgttttccaacaccaccaccgcgtcggcgcgtccggtttccagttcggttaacgcttcttcaagcgaaccgccacccataatgcccagccccatgctgttgacggaacgggcaatcatggtgataccgacgtcagcgccgcgacctttcagggctttcgcgacgttagccgccgcctgaatcacctctaagctaccggcgttcgtcccggagataatcaacggtttcttcgcacctgccagtgcctgcacgatgacgtcgattttgctttgcagctcaggttcgataccgtcaaccgctggtgcagagttatccagcgcatgggcgatggcaaaacctaaacgcgcctgatcttcaaccggtgcgcggtaagtccacgccgcgatatcatccagacgggtgtcatcaacgttggtaacaaacagcggatgcttcgcacgttgaccgatgttgaggattgccgcaatctgccagtcagccactttctgtgctgccgccatttcgcgcgctttacctttcacagcctgacgcactgccagcgcgacgcgcgcgccggtctgggtaacgtcttcgcccagcaccagtaccgcatcgtaagattcgatttcgcgcagagccggagtataaatgccgccttcacgcagcactttcagcgccagttgcagacgttcctgctcaccgtgagcgataccggtgtagaagttttcttcgcccaccagttcacgcagcgcaaagttgctttccacgctggcacgcggagaaccaataccgatcactttcttcgactgacgcagaatatctgccgcgccctgcattgcctgttcggcgttgagggtaatgaaatcatcgccacgacgctgtactggctgacgcggacgatccttcaggttgacgtaaccgtaaccgaaacgaccacggtcgcagaggaagtagtggtttaccgtaccgttgtaacggttttcgatacgacgcagttcgccgtaacgttcaccggggctgatgttacagccgatggaacattgctggcagatgctcggcgcaaactgcatatcccatttacggttgtaacgctcggagtgcgttttgtcggtaaatacgccggtcgggcaaatttcgaccaggttaccggaaaattcgctttccagcgtgccgtcttccgggcgaccgaagtagacgttgtcgtgcgcaccgtaaacgcccagatctgtaccgtcagcgtaatctttgtagtaacgcacacagcggtagcaggcgatgcagcggttcatttcgtgagagatgaatggccccaaatcctgattacggtgggtacgtttggtgaaacggtagcgacggaagctgtgtccggtcatcacagtcatatcctgaagatggcagttaccgccctcttcacataccggacagtcgtgcgggtggttggtcatcaaccactcgaccacgctttcacggaactgtttcgcttcttcgtcgtcaatggaaataaaggtgccatcggaagccggtgtcatacaggacatcaccaggcgaccacgcgtgtcttccgcgttttggtattgcttcaccgcacactggcggcaagcaccgacacttcccagcgccggatgccagcaaaagtaaggaatatcaaggcccagagacagacaagcttccagcaggttgtccgctccgttgacctcgtattctttgccgtctacatgaattgtagccattagcatgcttccagttttctcagtcagagactgagcgttaatcgaaattcggttaccagcgctctttcagcaggttcggctgaatcccattaatcaaatgggtattgctgaacggctgtttgattcccgcctcaaattcttcgcggaaatatttgatggcgctctgtaacggctccactgcaccaggtgcgtgggcacagaaagttttacccgggcctaagaatcgacacagttgctcaagtgtttcgatatcgcccggctgaccttcaccacgctccagcgcacgcagaattttcacgctccacggcagaccgtcgcggcacggcgtacaccagccgcaggactcacgggcgaaaaactcttccaggttacgcaccagcgacaccatgttgatctcatggtcaaccgccatcgccagcgccgtacccagacggctgcccgctttaccgatactttcgaattccatcggcagatcaaggtgcgcttcggtcaggaagtcagtccccgcgccgcctggctgccaggctttaaatttcagaccatcacgcataccaccggcgtaatcttcgaggatctcgcgtgcggtggtgccgaacggcagttcccacagtcccggatttttcacccgaccggagaagcccatcagcttggtgccagcatctttacttttcgagatgttctgataccactccacgccgttagcgaggatcgccggaacgttacacagggtttcgacgttgttgacacaggtcggtttaccccatgcgccggaggttgccgggaagggtggcttcgagcgtgggttagcacgacgtccttccagggagttgattaacgctgtttcttccccgcagatgtagcgccctgccccggtatggacgaacagttcgaaatcgaaacctgttcccataatgtttttgccaagcagacccgcttcggtggcttcggcaatggcacggcgcagattaactgccgcttcgatatattcgccacgcaggaagatgtagccacggtaagctttcagcgcaaacgcggagatgagcataccttccaccagcaggtgcggcagttgctccatcaacaggcggtctttataggtgcccggctccatttcatcggcattacacagcaggtaacggatgttcatggattcgtctttcggcatcaggctccatttcaggccagtcgagaagcccgcgccgccgcgccctttcagaccagcgtcttttacctgattaacgatttcgtccggagacagcccggtcagcgccttacgcgcgccttcgtaaccgtttttgctgcggtattcgtccagccacactggctgtttgtcatcgcgcagacgccaggtcagcggatgcgtttcgggagtacggataatgtttttcatttataccgctccagcagttcagggatcgcttccggggtcagatgcgcgtgagtgtcctcatcgatcatcatgtttggccctttatcacagttccccaggcagcaagttggcagcagcgtaaagcggccatcaaatgtcgtttgccctggtttgatgttcagctttttctcgagcgccgcctgaataccctgataaccgttgatatgacagaccacgctgtcacaataacggatcacatggcgaccaaccggctggcggaagatctgactgtagaacgttgccacaccttcgacgtcgcttgccggaatacccagcacatcggcgatcgcgtggatcgcaccatccggcacccagccacgctgcttctgaacgattttcagcgcttcaatggacgccgcacgcgggtcttcgtagtggtgcatctcgtgctcgatcgcttcacgctctgccgcactcagctcaaaagcctcggtttgtggttgttgattctcgtgcataattagcggtccacatctgacataacaaaatcgatactgcccagataaacaatcaggtcagacaccaggctgccgcggatcgccgccggaatttgctgcaaatgcgcaaagctcggggtacgaacacgggtgcggtaactcatggtgctgccgtcgctggtcaggtagtaactgttgatccctttggtcgcctcaatcatctggaaagattcattggcaggcatcaccggaccccacgacacttgcaggaagtgggtgatcagggtttcgatatgttgcagcgtgcgctctttcggcggcggcgtggtcagcgggtgatccgctttgaacgggccttccggcatgttgttgaggcactgctcaagaatgcgcagactctggcgcagctcttccactttaagcattacgcgggtgtagcagtcagaaacgccaccacccaccgggatttcaaagtcgaagttttcatagccagaataaggacgcgccttacgcacgtcgaagtcgatcccggtagcacgcaggcccgcgccagtggtgccccactccagcgcctctttcgcgccataggcggcaacgccctgggaacgacctttcagaatggtgttttgcagcgccgctttctcgtaagacgccagacgtttcggcatccagtcgaggaactcacgcagcaggcgatcccagccgcgcggcaggtcgtgcgctacgccgccaatacggaaccacgccgggtgcatacggaaaccagtgattgcttccaccagatcgtaaattttctgacgatcggtaaaggcgaagaacactggcgtcattgcgccgacgtcctgaataaaggtcgagatatacagcaggtgactgttgatgcggaacagttcggagagcataacgcgaatgacgttaacgcgatccggcacggtgatcccggccagtttctctaccgccagcacgtaaggcatttcgttaacgcagccgccgaggtattcgatacggtcagtatacggaatgtagctgtgccaggactggcgttcgcccattttctccgcaccacggtggtggtaaccgatgtctggtacgcagtcgacaatctcttcgccatcgagttgcaaaacgatacggaaagccccgtgcgccgacgggtggttcggaccgaggttgaggaacatgaagtcctcgttttcggtgccgcgcttcatcccccactcttccggtttgaaggtcagggcttccatctccagatcctgtttggctttggtcagctcaaacggcgagaattcggtagcgcgcgccggataatctttacgcagcgggtgacctttccaggtttgcggcatcatgatgcgtcgcaggttcgggtgaccgtcgaaagtaatgccaaacagatcccaggtttcacgctcataccagttagcgttcgggaacagtttggtgaaggtcggtacgtgcaggtcgttttctgccagcgccaccttcagcatgatgtcgcggttacgatcgatagaaatcagatggtagaaaacggaaaaatccgcggcaggtaacccttcgcggtgtgtgcgcagacgttcgtccatgccgtgtaagtcaaacagcatgacgtaaggtttcggcagtttctttaagaaatcgccaacttccagtaattgttcacgcttgatccacacaacgggaaccccggtgcgagtcgcctgaacagtaaaggcatccggcccaaaacggttgcgcagttcgccaatcaccggatcatcaagatgatcgcgggtctgccaggcgggttcttgcgcggttaagtcggtcatattgttcaccattgcaaatggtccgtggtgactgtcggcgcagtaagcttcgcgaaatagatttaggaataagcgaagaaaaatccctttgccgacaggcgcaaattaaatctcgtcaggtgtacgcaggttagttacggcaatgcgttcaccgcgcttgcgttcgcgctctgattgcatattggcgcgataaacgccctgatcgccaaccacccaggagagcggacgacgttctttgccgatagattcctgcaacagcatcagtgcctgcatgtacgcttcaggacgcggcgggcagcccgggatatacacatcaaccgggatgaatttatcgacgccctgcacaacggaataaatatcgtacataccaccagagttggcacaggcacccattgagataacccattttggttccagcatctggtcatacagacgctgaataaccggtgccattttggtaaagcaggttcctgcaaccaccatcaggtcagcctgacgcggcgaagcacgcaatacttctgcgccaaaacgcgccacgtcatgcaccgcggtaaacaaagtcaccatctcaacgtaacagcaggaaagaccgaagttatacggccaaattgagtttttacgaccccagttaaccatgtcattgagcttgcccataaacacgtttttgttaacttcttgctccagagggtcggttacgatctcctgcttttgcagggggtaacggtcgttctcaccgttgggatctatgcgggtgagcgtataatccatcttaatgcctcgcggttagcgttgacgattagcgatactgttcgtttccgggttcatacgctcgcggcgtgaacgcgcgggcgtccagtccagcgcgccaatacgcaccagataaaccagacctgccagtaacacaaaaataaaaattgcagcttccacaaagcctacccagccgctttcgcggatagaggttgaccatgcgaacagatacagcgcttcaacgtcgaagataacgaagaacatggccaccagataaaacttggcggacaggcgtaagcgggcggagccgaccgagtcgataccggattcaaacggcacgtttttcgacctcgcgcgtgcgcgaccgcctaaaaaccaaccgcctaccagcatcaggcaacacaggccaatggcaacgataagaaagatagcgaatgcccagtgatgagcgatgacttcagtggatgttgacatactcattgcttactcatcaaaagtagcgccagattcactgctcttcacggcagatggacgccacatcgattcatggggaggaataaaaaaaaccttacaatcactgtagaaattcttttatacagctaattgatgtggttttttactcctttctataaccttttgtcaactttaacaaaagtttcttcacattagtttacataatatcaacaccattagcatttaatgccctttcaccccagatccttgacgactccaggataattagatgttgttgaatcgtgtccgttgtgaagcaatggaaaaaatacgggtctattttgacaggaatttgtgtcgattcctccccccaaaagagagtattttcttgatctgtgacacgcttttgtcattccataacaaaaacgcagcaacaaatttacgtattttttaacatcattgtagcaggtgatttttttcaggcgattatttgtgcgttcgggacgtgaatctctggtggttgaaaaatgaacagttttgtacgttctgcactatgcgatgaaggatttttactaaaaaaaagccgctggggtttaaaacacccccagcggctcgttttttacactattgtctcaggaattatctatcgtccgtcgattactcgatatccctttcaatcaacaatgaatcatccccttccggagcagacattgggctgtattgccacggattatggtagctctccatcgcctgatagatcacctgggccagctcattattactggacggatcatagcacagcaaatattcggtatcaggtagcggcggtaagccatctactccactcagcacacgcaggtccgggctcatcatctcaaccggccttgccgtcacgccaagaccggctttcactgccgcacgaacggccggaagcgtcgaggcgacataagccagtcgccatggaatatctgctttattaagcgtcgccagcaccatatcgcgaaacgggctaggatcatccagcaatacaagagggatcggctcgcctttttgcaatatgtattccgctgcgcagtaccagtgtgttggcgaggtacgcaggttcaatgccttaaacgctgaaggacgatgggtggttaccatcaaatccacttcctgggattccagcatttctgccatataggcattacgtttaacgcggacatccagcgctaatttcggataaaccgaactcacgcgatttaacaggaaaggtaagatcgtatcggcagattcatctgaagcaccgatagttaatacgccctgaagattactgaacattaatgatgagcaggcctcatcattaaaacgcaggattttcctggcgtaaccaagaagttgaatgccatgttcagttaacagtttgttgcgaccgtgacgagcgaacagttctttcccaacgagttgttccagacgctgcatttgctgacttacggcggactgagtacgacacacagcggcagctgcggcagcaaaagtgttcagatcggcaacagcaacaaatgttctcagcagatcgaggtcgaggttaattatcggacgatttgcacttatcatatattatcacttactggcggctcatactgagctggttaatgctgtgcacacacaaacaagcaattccatttgtaatgtgcctccctggcagtttcatccggaacccggacgaaagtaaaaatgcatatgagttgcactaaaaaagcggtaatgactccaacttattgatagtgttttatgttcagataatgcccgatgactttgtcatgcagctccaccgattttgagaacgacagcgacttccgtcccagccgtgccaggtgctgcctcagattcaggttatgccgctcaattcgctgcgtatatcgcttgctgattacgtgcagctttcccttcaggcgggattcatacagcggccagccatccgtcatccatatcaccacgtcaaagggtgacagcaggctcataagacgccccagcgtcgccatagtgcgttcaccgaatacgtgcgcaacaaccgtcttccggagactgtcatacgcgtaaaacagccagcgctggcgcgatttagccccgacatagccccactgttcgtccatttccgcgcagacgatgacgtcactgcccggctgtatgcgcgaggttaccgactgcggcctgagttttttaagtgacgtaaaatcgtgttgaggccaacgcccataatgcgggctgttgcccggcatccaacgccattcatggccatatcaatgattttctggtgcgtaccgggttgagaagcggtgtaagtgaactgcagttgccatgttttacggcagtgagagcagagatagcgctgatgtccggcggtgcttttgccgttacgcaccaccccgtcagtagctgaacaggagggacagctgatagaaacagaagccactggagcacctcaaaaacaccatcatacactaaatcagtaagttggcagcatcaccaaaaaagcgactcacattgttccgttataatgcctgaagtagatcacagaatatatcttcagggatcgcatatctattaagttactcactcttttctatttatgacatgcgcgtgtttgtataaatgtaaatgtgagtccttgttccactctcgtgcagcatcgctggtcatacgcgaacacgtaccaacagcaatggtgaggcggcatcaagagcagggatccgtcatttatccgagcattttaccccaaaaaccttttatttataagggtcattgcgaattatctgatgcaaagttatgttatgttaggcaaagtaatcttctattattaataagcacatcaaaacctttttgaatattaaataataattaattagcatcatcctcattcattaattccgcttaacaatagtttcacaccttgcccccattgcgacacctcggaaatcatcacgcagttaaactctccgtaatgaggaaatatcatcatcgcgtttcattagtgaattcttaaatgaggcattttcacacaattatcttacagataaaaaaaccagacttacaattaagaatcagaacaattcactatataacattgcatgtaaagcatatacacctcattattttgtcattattaagttattaacagcacaatcgagccttcccctctggcaaaatcttattctgcagaccttcaaaacaccgtcctgggggagtacattgttctaagctgacttccacggcagggagtggcgataacagcaaaaaaggtcaagattcatgtcccccattgaaaaatccagcaaattagagaatgtctgttatgacatccgtggtccggtgctgaaagaagcaaaacgcctggaagaagaaggtaacaaggtactgaaactgaacatcggcaacccagccccgttcggttttgacgcgccagatgaaatcctcgttgacgtgatacgcaacctgcctaccgctcaagggtattgcgattccaaaggtctttactccgcgcgtaaagccatcatgcagcactaccaggctcgtggcatgcgtgatgttaccgtggaagatatttacatcggcaatggtgtatcggagcttatcgttcaggcaatgcaggcattgctgaacagcggggacgaaatgttggttcctgcaccagattacccactctggaccgcggcggtttcgctttccagcggtaaagcggtgcattatctttgcgatgaatcctctgactggttcccggacctcgatgatattcgcgctaaaattacgcctcgtacgcgtgggatcgttattatcaacccaaataacccaaccggcgcggtatattccaaagagcttttaatggagattgtggagattgcacgtcagcataatctcattatcttcgccgatgaaatttatgacaaaattctctacgacgacgctgagcatcactcaattgcgccgctggcacctgacctgctgaccattacctttaacggactgtcgaaaacgtaccgcgttgcaggcttccgtcaggggtggatggtgttgaacgggccgaaaaaacacgccaaaggctacatcgaaggtctggaaatgctggcttcaatgcgcctgtgtgctaacgttcctgcgcaacacgccattcagaccgcgctaggtggttatcagagcatcagtgaatttattacccctggcggtcgtctttatgagcagcgtaaccgcgcgtgggaactgatcaacgatattccgggcgtttcctgcgtgaaacctcgtggtgcgctgtatatgttcccgaaaatcgacgccaaacgctttaacattcacgacgatcagaaaatggtgttggatttcctgttgcaggaaaaagttctgttggtgcaagggacggcattcaactggccgtggccggatcacttccgcattgtcacgctaccgcgtgtcgatgatatcgagctgtctttgagcaagttcgcgcgtttcctttctggttatcatcagctgtaatcttaatttcactgccggagattgcatccggcagcgttatcccgccacaatgacctgatgatgtcatcatacgtaaggtcactatgaaacagagccatttttttgcccatctctcccgcctgaaactcattaaccgctggccgctcatgcgcaacgtgcggacggaaaatgtgtccgaacacagtttgcaggtagcgatggtcgcccatgcgctggcagctatcaaaaatcgaaaatttggcggtaatgtcaacgccgaacgtatcgctttactggcgatgtaccacgatgcctcagaagtgctcaccggcgatctccctactccggtgaaatacttcaattcgcaaatcgctcaggagtacaaggctattgaaaaaatcgctcagcaaaaactggtcgatatggttccggaagagctgcgggatatctttgcgccgttaattgacgagcatgcatatagcgatgaagaaaaatcgctggtgaaacaggcagatgcactgtgtgcatatctgaaatgtctggaagaactcgcggccggaaataatgaattcttgctggcaaaaacgcgactggaagcgacgcttgaagcgcgtcgcagccaggagatggactacttcatggaaatatttgttcccagcttccatctttcgctcgatgagattagccaggattcaccgctgtaagcagccggagtctgcgtcgcatcaggcaataagcgccggatgcgacatcaggctcttgtcaaaacggaaacagcatcgggatcatcaccacacaaaccgccatcacgataatggtgaacggtacccccaacttcacaaagtcactgaagctgtaatttcccggacctaaaaccagtgtgttaacaggtgaagaaaccggtgtcataaaggcggcggatgctgccatcgccacgaccatcgcgaatggataaggcgacacccccatcgttttggcagcagccagcgcaatcggagccatcaacaccgccgtcgcggtattagagataaatagcccaataaccgccgacaagacaaacaaacaccccagcatcatatgtggcccgtaaccaccgccaatgtccatcagccctttcaccgccagcgcgacacctcccgttttctgtaatgccacagcaaacggcatcatcccaacgatcaaaataatgctcggccagtgaatggatttataggcgctttcagcatctatacagcggaatttccccatcagcaggcaggcgatgatagcggcaacaggattaggaatttcatctgtcagcattaacgccaccattagcaccagacagaaaatggcatggggtgcctggctgtgcgcgggtgatgcttcactcacctcttccggtaagttcagcgctacgaagtcgcggccctgtttggccagcataccgatcagtttccagttacccacaaccaggatgatatcgcccagcagcagaggctcatccgccagcgaaccttccagcgccacgccattgcgctttagccccaccacattcagtccgtagcgggtacgaaaaccaatttcgcgcaccgatttaccaatcagttctgactcaggaattaatgaaatctctgccatgcccacatcaagggcctggtcagaaaaatactcgccgcgcagtaccatcggctccagcaattgctcactacaaaattgccggagatcgacatcagccgcagacatatcaataagcaaaacgtcacgcgcgcgaaattcagaaaccccattaacgttcacgataacgcgacgaaaacgccgccagcgttcaacaccgatgacgttagcgccataacgctcacgtaatttgagatcatccagccgttgaccaatcattggcgatccggggcgaatagccagacgtcgcgcacgcccggtcagtcgatattcacggataagatcgcgaaaggttcgacgcgtccagccttcgcgctgcggggtctgggtatcccctttcagcatgaaacgcatcactaacatatacaaaatacccagcaccagcacgaccaggccaataggtgttacgctaaagaaactgaagccgtgatagccttcacgcagcaattcactgttgactaccaggttcggcggcgtcgccaccagcgtcatcatgccgctaatcagcccggcaaaacttaacggcatcatcagacgtgacggcgacgtttgcatacgcatggcaacgcttaacaccacgggaataaagatagcgacaacgccggttgaactcataaacgcgccaagccccgcgacggtcagcatcaacaaaaccaacattttgatttcactattgcccgcaactttgaccagccatgttcccattacggtggcaacaccggtacggaccaaaccatcgccaataataaacaaggcggcaatcaggacaacgttaggatcagaaaagccggaaaatacttctgggactgtcagcgttccgcttaatgcaaacgcgacaataacaaacaaagcgaccgcatccatacgcactctgcccgtcgcaaacaagacgatggcaacggccagtaatgaaagaacccaaatcaattcaccgttcacaacttatccttgttaattgagggggatgacttgattctgccataaaaaagccccgacgagacggggctaaatcatgatcaggtgtttcactgaataataacatcgccatttggctgtttggtcacagtaatttgctccagactgtggaggaccaaatcgacctcattcaggcgcggggtatctgccggagcgttaaccgcaatgacatgacaacccgccgccaggccagaaagcacgccagcgggagcatcttccaccaccacacactcctgcggcgcaagccccagcagctgcgcgcctaacagatacgcatcaggttctggttttccgcgcttcactcgctcagcggttacaaacacctctggtgcgggaagcccagctattttatggcgcgctcgcgctaccggcatggagccagaagtcacaatggcccacggaatacctgctttattcaaatgactgagtaaggcgattgcccccggaagcgcggtaataccttcggtttccgtggcctcgatgtgctccagacgcgtaaactcggcggcaatatcagcctcggatttgcccgccataaaatggcgcagagaggtgatcgcctgtttaccgtgaatgaaagccagcacctcttccggcgctaacccatgacgtctggcccagttgctccacgcccgttctaccgcaggcagggaatccaccagcgttccatcaagatcaaacagaaaacctttgcaccgcacgcgggcctcctcaggcattgataatttgattaatttcgttggcgctcaaatggtactgacgcgggcaggcatgccacacattaagcatgcgctgatatttttcccacattggcgtctgggcgttaaaaccgtgagttccggcgtcaaaatgggtatagcgcccttccacattaaccataaagcggacataaccgaggtaacgtgcttcagtggcggcgtcaaagccgaggaaggtgacacgacgttcatcgatggattgctggtcctgcaaattagaccaggaaacatgcaacgcatgatacatctccataatgtcgatgatagtgcggcaggtttcttctttcagctcgccaaactcgcgatccaattcacgcatctgtaatccgtaaccacgctcaataattgtttgcaggcgacggtaacgttcagcatttgccggatcgagcatagtcatcatcttgtactgattagacaaaataagacgttgcgcgttggtcatttccattgttgactcctgtatcactctactacggtgaaaaaaaagaaggctgagtatgccttcttttatatgcgtaatcaggggtcaattacaaatcatcaaggaaagttttatccagttgtttgaaggcgcgcttaagcgtgtcagctaatgcctggtaatcaggcttgccttcaacgggtgccaacacctgtccagactcctgcaatttaccgcgaacttcataaaaccagttaaggattgcagggggtaatggcgtgacagaacgcttgcccagccaccacaatccctgcatgggtaaacttaaggcgaacagggcagtggcaactgccggcccaagctgaccgcccagggcaatctgccagcagagagtaaatacggcgatcggcggcataaaacggatcgcataacgcgtcatcttgataacgcgattttcgacaaagaccggggcaaggcgtttttccagcggccacgtctttgagtaatgctgtccccggcgaaacaagctaaaaaaattaacagaacgattatccggcgttgacatgcttcacctcaacttcacatataaagattcaaaaatttgtgcaaattcacaactcagcgggacaacgttcaaaacattttgtcttccatacccactatcaggtatcctttagcagcctgaaggcctaagtagtacatattcattgagtcgtcaaattcatatacattatgccattggctgaaaattacgcaaaatggcatagactcaagatatttcttccatcatgcaaaaaaaatttgcagtgcatgatgttaatcataaatgtcggtgtcatcatgcgctacgctctatggctccctgacgtttttttagccacgtatcaattataggtacttccatgtcgagtaagttagtactggttctgaactgcggtagttcttcactgaaatttgccatcatcgatgcagtaaatggtgaagagtacctttctggtttagccgaatgtttccacctgcccgaagcacgtatcaaatggaaaatggacggcaataaacaggaagcggctttaggtgcaggcgccgctcacagcgaagcgctcaactttatcgttaatactattctggcacaaaaaccagaactgtctgcgcagctgactgctatcggtcaccgtatcgtacacggcggcgaaaagtataccagctccgtagtgatcgatgagtctgttattcagggtatcaaagatgcagcttcttttgcaccgctgcacaacccggctcacctgatcggtatcgaagaagctctgaaatctttcccacagctgaaagacaaaaacgttgctgtatttgacaccgcgttccaccagactatgccggaagagtcttacctctacgccctgccttacaacctgtacaaagagcacggcatccgtcgttacggcgcgcacggcaccagccacttctatgtaacccaggaagcggcaaaaatgctgaacaaaccggtagaagaactgaacatcatcacctgccacctgggcaacggtggttccgtttctgctatccgcaacggtaaatgcgttgacacctctatgggcctgaccccgctggaaggtctggtcatgggtacccgttctggtgatatcgatccggcgatcatcttccacctgcacgacaccctgggcatgagcgttgacgcaatcaacaaactgctgaccaaagagtctggcctgctgggtctgaccgaagtgaccagcgactgccgctatgttgaagacaactacgcgacgaaagaagacgcgaagcgcgcaatggacgtttactgccaccgcctggcgaaatacatcggtgcctacactgcgctgatggatggtcgtctggacgctgttgtattcactggtggtatcggtgaaaatgccgcaatggttcgtgaactgtctctgggcaaactgggcgtgctgggctttgaagttgatcatgaacgcaacctggctgcacgtttcggcaaatctggtttcatcaacaaagaaggtacccgtcctgcggtggttatcccaaccaacgaagaactggttatcgcgcaagacgcgagccgcctgactgcctgatttcacaccgccagctcagctggcggtgctgttttgtaacccgccaaatcggcggtaacgaaagaggataaaccgtgtcccgtattattatgctgatccctaccggaaccagcgtcggtctgaccagcgtcagccttggcgtgatccgtgcaatggaacgcaaaggcgttcgtctgagcgttttcaaacctatcgctcagccgcgtaccggtggcgatgcgcccgatcagactacgactatcgtgcgtgcgaactcttccaccacgacggccgctgaaccgctgaaaatgagctacgttgaaggtctgctttccagcaatcagaaagatgtgctgatggaagagatcgtcgcaaactaccacgctaacaccaaagacgctgaagtcgttctggttgaaggtctggtcccgacacgtaagcaccagtttgcccagtctctgaactacgaaatcgctaaaacgctgaatgcggaaatcgtcttcgttatgtctcagggcactgacaccccggaacagctgaaagagcgtatcgaactgacccgcaacagcttcggcggtgccaaaaacaccaacatcaccggcgttatcgttaacaaactgaacgcaccggttgatgaacagggtcgtactcgcccggatctgtccgagattttcgacgactcttccaaagctaaagtaaacaatgttgatccggcgaagctgcaagaatccagcccgctgccggttctcggcgctgtgccgtggagctttgacctgatcgcgactcgtgcgatcgatatggctcgccacctgaatgcgaccatcatcaacgaaggcgacatcaatactcgccgcgttaaatccgtcactttctgcgcacgcagcattccgcacatgctggagcacttccgtgccggttctctgctggtgacttccgcagaccgtcctgacgtgctggtggccgcttgcctggcagccatgaacggcgtagaaatcggtgccctgctgctgactggcggttacgaaatggacgcgcgcatttctaaactgtgcgaacgtgctttcgctaccggcctgccggtatttatggtgaacaccaacacctggcagacctctctgagcctgcagagcttcaacctggaagttccggttgacgatcacgaacgtatcgagaaagttcaggaatacgttgctaactacatcaacgctgactggatcgaatctctgactgccacttctgagcgcagccgtcgtctgtctccgcctgcgttccgttatcagctgactgaacttgcgcgcaaagcgggcaaacgtatcgtactgccggaaggtgacgaaccgcgtaccgttaaagcagccgctatctgtgctgaacgtggtatcgcaacttgcgtactgctgggtaatccggcagagatcaaccgtgttgcagcgtctcagggtgtagaactgggtgcagggattgaaatcgttgatccagaagtggttcgcgaaagctatgttggtcgtctggtcgaactgcgtaagaacaaaggcatgaccgaaaccgttgcccgcgaacagctggaagacaacgtggtgctcggtacgctgatgctggaacaggatgaagttgatggtctggtttccggtgctgttcacactaccgcaaacaccatccgtccgccgctgcagctgatcaaaactgcaccgggcagctccctggtatcttccgtgttcttcatgctgctgccggaacaggtttacgtttacggtgactgtgcgatcaacccggatccgaccgctgaacagctggcagaaatcgcgattcagtccgctgattccgctgcggccttcggtatcgaaccgcgcgttgctatgctctcctactccaccggtacttctggtgcaggtagcgacgtagaaaaagttcgcgaagcaactcgtctggcgcaggaaaaacgtcctgacctgatgatcgacggtccgctgcagtacgacgctgcggtaatggctgacgttgcgaaatccaaagcgccgaactctccggttgcaggtcgcgctaccgtgttcatcttcccggatctgaacaccggtaacaccacctacaaagcggtacagcgttctgccgacctgatctccatcgggccgatgctgcagggtatgcgcaagccggttaacgacctgtcccgtggcgcactggttgacgatatcgtctacaccatcgcgctgactgcgattcagtctgcacagcagcagtaatctcgtcatcatccgcagctttgcgctgcggatatctgaaccggaaataatcactatttccggttttttattctcttaatttgcattaatcctttctgattatcttgcttaactgcgctgcatcaatgaattgcgccatcccactttgcatacttaccactttgttttgtgcaagggaatatttgcgctatgtccgcaatcactgaatccaaaccaacaagaagatgggcaatgcccgatacgttggtgattatcttttttgttgctattttaaccagccttgccacctgggtagttccggtggggatgtttgacagtcaggaagtgcagtatcaggttgatggtcaaacaaaaacacgcaaagtcgtagatccacactcatttcgcattctgactaacgaagcaggcgaacctgagtatcaccgcgtacagctgttcacgacgggcgatgaacgcccgggcctgatgaacttcccgtttgaaggattaacctcaggatcgaaatacgggacagccgttggcatcatcatgtttatgctggtgattggcggcgcgtttggcattgtgatgcgtacaggaaccattgataacggtatcctggcgcttattcgccatacccgcgggaatgaaattctctttattcctgcgctgtttattctgttttcacttggcggcgcggtatttggtatgggagaagaggccgtcgcctttgccattatcatcgcaccgctaatggtccggctgggctatgacagtattaccaccgtcctggtgacctatattgccacgcaaatcggttttgccagttcgtggatgaacccgttttgtgtggtcgttgctcaggggattgccggcgttccggtgctttctggctccgggttgcgcatcgtggtgtgggttatcgccactctgattggcctgatctttaccatggtgtacgcctcacgagtgaaaaagaatcctcttctgtcacgcgtgcatgagtccgaccgcttctttcgtgaaaagcaggctgatgttgaacaacgtccgtttacctttggtgactggctggtattgattgtcctgaccgccgtaatggtctgggtgatttggggcgtgatcgttaatgcctggtttattccagaaattgccagccagttcttcaccatgggtctggtgattggcatcatcggcgttgttttccgccttaacggcatgacggttaataccatggcttcatcctttaccgaaggggcgcgaatgatgatcgcccctgccctgctggtgggtttcgccaaagggattttgctgctggtcggtaatggtgaagcgggtgatgccagcgtgttaaataccatcctcaacagcattgccaatgccattagcggtctggacaacgcggtcgcggcctggtttatgttgctcttccaggcggtatttaatttcttcgtgacgtccggttctggtcaggcggcgttaaccatgccgttactggcaccgcttggcgatctggtcggtgttaaccgtcaggttaccgtgctggcgttccagtttggtgatggcttcagtcacatcatttacccaacctcagcgtcgttaatggcaacgctcggtgtgtgcagggtggacttccgtaactggctgaaggtgggcgcgaccctacttggactgctgtttattatgtccagcgtcgtagtgatcggcgctcagttgatgggctaccactaaaaatgttaagagccgcaattgcggctcttttttcattctgccgtttcagtctctacggcttcatttttggcattgcgcttcatccacaacgctagcgctttcagcgagtctggagtgaactcatcgcagcgtgcggtgatttcttccggcgtcagccagcaaacttcactgacttcatcttcctgtagtgcgaagggaccgtgagagacgcagctgaacaatgcgccccagacacggcaatttttatcttcgaaatagaactgcccgtgctcggcaaaggggacaccggcaatgcccaactcttcttccgcttcgcgacgcgcggattccagcagttgctcatcggcctggactacaccgcctgcggtcgcatctaacatgccgggtaaaaagtcttttgtctcggtacgacgctggaccagaattttgcccatgccatcatgcacgacgatgtaagttgcacgatgacgcagacactgtgcccgcatttgttcccggctggcttgtgcaatgacttcgttctcttcattgacaatatccacccattcagtacttgccaaacgacgctgttccattatcaggaaaccttctttttctggcgctcttacggcgcattttgagttgtgggtaaattacggattaatcgcgacctgcgcaatgatactttgatcattgagtgcgattacactaagtacgtcattatccagcatgccataactcgccggattaccgcctttcggaatactcaccgagccggggttgaagtggaaaatctccccccgctgttctgccactggcagatgggtatgaccgtacaccagcacatcgttctggtttaaagcaggcagattttccgggccaaaaagatgaccatgcgtcaaaaacagacgttgtttttccagtaatacctgttgccacggcgcggttatcgggaaatgcagcagcatttgatccacttcgctgtcgcagttgccgcgcacagcgataaccttatgtgccacttcattaagccgttcagcgactttggctggcgcgtaaccctccggtaaagcattacgcgggccgtgattcaacacgtcgccaaggatcaccagccactgggcaccgctttgggcaaacaactccagaacacgttccgtcgccggtaacgacccatgaatgtccgatgcaaacatcagtttcatcactcactcctcgtcgaaaaaacgtaagctatgatactggattctgtcgttgctatcagccagattgcttcgccgaaagtgcaataaaacgctggacagacgctcgctgccactggaatgttgcataatccaccaggcgttctggcacctcatcgccatgtagtaccaggcggttaatcattagcgccagatcagtatcagcaatgcaccattcaccaaataaattcggctgacccagtactaacaaatgttctgccatcgcgaacagtttctctgcactggcttttccctcggccgttagtggcgcttttttcgcccccgcaaagacaacatccgtcggacgctcttcgcggatgggcatcagatcgctgcgcagccaggcctgaatctgtcgtgcacgcgcacgattttctaaatcaagcggataaatacgttcccaggtcggtggcgcaaatcgatcttccagatactccgcaatggcagaagattcactcaactcaaaatcatcgatttgtaataacggcacacggcgtgtctgaccgtaaccttgccacgtcggctgcaaatgttcaccgctgtcgaggtcgatggtcttgatatgaaacgacaggcctttttcctgcaacgccacccaggcggataacacataaggggagaaaaagtgggcatctgaccaaagcgtgatagcgggtttactcattatgtcctcggcaataaagggggctggctatcaaactatagagcctttttgtcactgtcacgtgacgaatactcacgtaagtcgccgcgctttctatacttgtggtgttcagatgattaaacaaccggagctgcaatgatcgatctctatttcgccccgacacccaatggtcacaaaattacgctgtttctcgaagaagcagagctggattatcgcttgattaaggtagacctggggaaaggcggtcagtttcgtccggaatttttgcgcatttcgcccaacaacaaaattccggcaattgttgatcattctcctgccgatggcggcgaaccgctaagcctctttgagtctggtgccattttgttgtatctggctgagaaaacaggactctttttgagtcatgaaacgcgtgagcgcgccgccacattacagtggttattctggcaggtaggcggactggggccgatgcttgggcaaaatcatcattttaatcacgcagccccccaaaccattccttacgctattgaacgttatcaggttgaaactcagcgtctttaccatgtactgaacaagcggctggaaaactcgccctggctgggaggcgagaactacagcattgcggatattgcctgctggccgtgggttaatgcctggactcgccagcgaattgacctagcaatgtatccggcagtcaagaactggcatgagcggatccgttcgcgccctgccaccgggcaggcactgctaaaagcacaactcggtgatgagcgttcggatagttaacagaaacaggttctcgtgtattatttcatcctaagtaaaacaacggagaacctgcaatggcacaacctgccgctattattcgtataaagaaccttcgtttgcgtacgtttatcggaattaaggaagaagaaattaacaaccgtcaggatattgttatcaatgtgacgatccactaccccgccgataaagcgcgcactagcgaagatatcaacgatgcgctgaattatcgcaccgtaacgaaaaacattattcagcatgtagagaataaccgtttctctttgctggaaaaattaactcaggatgtgctcgatatcgcacgtgaacatcactgggtgacgtatgctgaagtggagatcgataaactgcacgcgctgcgctacgccgattcggtatccatgaccttaagctggcagcgttaatcgccatatcgggaggctgcatgaacatagtgatcaccggagggacaggattaattggtcgccatttgattccgcgtttgctggagctgggccatcaaattacggtagtgacgcgtaacccgcagaaagccagttccgttctcggccctcgggtgacactatggcaagggcttgccgatcaaagcaacctcaacggcgttgatgcggtaatcaacctggccggagaaccgattgctgataaacgctggactcacgagcaaaaagagcgtctctgccaaagccgctggaatatcacgcaaaaactggtcgatttgattaatgccagcgacacgccaccgtcggtactcatttccggctcggcaacgggctattatggtgacttaggtgaagtggtggttaccgaagaggaaccgccgcataacgaatttacccataaactctgcgctcgctgggaagaaattgcctgccgggcgcaaagtgacaaaacgcgagtgtgcctgctgcgtaccggtgtagtgctggcaccggatggcggtattctcggtaaaatgctgccgccgtttcgtcttggcctgggcgggccgattggctctggtcggcagtatctggcctggattcatattgatgatatggtcaacggtattctctggctgctggataacgagctgcgcgggccatttaatatggtttcgccctacccggtacgcaatgaacaatttgcccatgcgctcggtcatgcgctgcatcgcccggccattttgcgcgtccccgcgaccgccattcgactgttaatgggcgaatcttcagtactggtattaggtggacaacgcgcgctgcctaaacggctggaagaagcgggttttgcgtttcgctggtacgatttagaagaggcgctggcggatgtcgttcgctgatgtggtttacagcaaacatccgccagttaactcccggtgttacaggattagtggctttgcgcgataagatcgtctggtgaaagtcgggtcaccatcataactaactctctgtctaaacctctatccagcatctcctgagcaatacgcagggcttcttcgtgtttgccctgcattgcgccttcttcacgtaatctgtcagcaatggtcatcagtttctccttttcttgtggtgcgcgttccgctatctcaccaataaatgcacgaaaacgctgggcatcccctgtttgtaatacgtaattaaacagggcttttagctgtctgtcattagtgttccctgtaactagcagcgaaacaatttggtcgactaatcccaacagatcgcgctgacgaatatgtttctgaattaactccaacagcgccattttgcggtgttgcataatctcgtcatccggcaccacggtaatatccaccaacggaaaagccgatgaatatattttgcgggctatagcaggctcggcaaattcatcaagccagcagagtgaataaggataaggacttctgcaaccatgataaaacagcatcgggagcaccaatggaagctctttatagcccgcatcaagatggttttgcattgccgcaatggaataacgcatcatgcgaaaagccattaattcttccggcttactttggtgctctatcactacataaatataacccactccctcctgcgttttcacagaccacaagaggtcggaataatattgccgcaggtcttcatcaataaaactgtttggttccagtttaagcgtcgttaaatcacacagtttgcgcagcggcgcgggaagatgaatatcaataaaatcccgcgcggtgtctggatggcgtaaaaaagatttaaataccgcatcatgcggcgtggaagttgtcgatattgtcatggcgttccgtcacccctcaaatttaagatgacgcgacaataaccacgattaacacccaatgcagcaggcagtttttatctttggacagcgaattcagaagtatttttagcggactgtaacttttacatttcagcggaagctgactcgcaaattccccatgaaaatactccggcagcgttagccaccggagaggaaattatttcagcgatcccttaaggaaccgttgcagacgagggctttgcgggttgccaaataactgctccggcgcgccctcttcttctattttcccctgatggaggaaaatgacatgagtagaaacatggcgagcaaagcccatttcgtgagtcactaccaccatggttttcccctcttctgccagttgctgcataatacgcaacacttcgcctaccagttcaggatcgagcgccgaggtaggttcatcaaacagtaaaacttccggttccatcgccagcgcccgcgcgatagaaacacgctgttgctgaccgccggaaagatgcaccggatatttcccctgcgcacgttcgtctatcccgacttttgccagatacttcaccgcccgctcgcgcgcttcctgcttgctcaggcccaacacctgaatcggcgcttccatgacgttttccagcaccgtcatatggctccagagattgaagtgctggaataccatcgtcaggcgtgtgcgcagtaagcgcagttgatttttatcggcgactttgagttgaccgtctttgtcgcgcaccagattgatcgtctggccattgaccacgatcgacccttcactcggtttttcgaggaagttaatgcagcgcagaaaggtacttttccccgatcccgacgatccgatgatgcttattacatctccggcattcgcttgcagtgatacccctttcagcacttcatgttcgccgtagcgtttgtgcaaatcgataacgtttaatttattctcggacatcgtattctcagtgcgttgaagaaggtttcacatgctgcaaccagcgtttttccgctctgcgaaagaggctgatcaggacataagagatgattaaatagagcaccgcggcaatgccgaaggcggtaaaaggttgatacgtggcggcgttaatatcgcgggctattttcagcagatccggcaccgtggcagtaaatgccaacgcagtagagtgcagcatcaggatcacttcgttgctgtatgccggtaacgcaatacgcagcgcagaaggcaaaataatgcagcgatacattttaaaagtcgagaagccataggctctggcggcttcaatttccccatgcggaaccgaacggattgccccagcaaaaatctcggtagtgtaagcgcaggtgttaagcgtcagcgccagcacggtacagttcaggccactgcggaagaaagcgttaaggaattcggttcccttaacaatctcaagcgtgtacatgccggaatagaacaccagcaactgaacatacagcggcgtaccgcgaaaaatataggtaaataaccagattggaaactggatgtatttattactggagacacgaccaatcgccagaaacagcgccaggactccgcctatcactaccgacaaaataagcagccacagagtgatcgccacaccagtaaagcgataaccgtcggtccacagcagcggtttccagtattcatgtaagatttcgatcacaggtcagccctcttcacacccacggagtagcggcgctcaaggaacagcagcacaccattggaaacagtggtgaaaaccaggtaaatcacgccacagacgatggcgaaatagaacggttcccaggtacttttgcctgccagttgggtggctttgaccacatcttccaggccgagtaacgaaaccagtgcggtagatttgaggatcacctgccagttgttgccaatgcctggcagggcgtaacgcatcatcgacggaaacatgatccgccgaaacacttgcccacgagtaaaaccgaacgccgtcgccgcctctatatgtcctttcggcactgccataaaagcaccacggaacgtttcggtaaaataagcaccgtagataaaaccgagagtgataataccagcgaccatcggatcgatatcaatctgcccgacgcccatcgcctccgtcaccgtgtttagcgcaatctgcaaaccgtagaaaatcagcagcatcaacactaagtccggcacgccacgaatcagcgtggtgtacccttcgaaaatcagccccgaaagccgattttgcgagagcttaccgccagcgccaattaaaccgatgattacagcgagcactacagagctgatagccagctccagcgtgacgagcgcaccctgtaaaataacacctgaaaacccatacaacatgctgcctgtcctgtcgtgtgtggtgaattaccgcctcttgtctccctccggttacccgaagggagcgggctttctttcaccgatggcgattagccaccataaacatcaaaatcgaagtactttttcgctaatttctcgtaagtaccgtcagcgcgcatttcggcaaaggctttgttcagtgcttcgcgcagttcgttatcttctttacgcaggcccatgccggtccctacgccaaacagtttttcatctttaacagacgggccaccgaatttgtaatctttaccgacaggttgtttgaggaaaccttcgctggcagcgacctcatcctggaacgcggcatcaatacgtccggcagtcaggtcagaataaatgttgtcctgcccctgatacgagacgatttcaatgccttttggtgcccaatgttcattaccgaacgtctcctgggtggtgccctgcaatacgcctacccgtttgcctttcagcgactcgactgtcggctgaatgtcagaatttttcgccaccaccaaacgagaatcggcagcgtacagtttgtcggtgaaggctatttcttgctgacgtttttccgtaatggaaagcgatgacatgatggcgtcaatcttcttcgcttttaaggacgggattaacgcatccagcggattttcgacaaacgtacattgcgtattgatgcgtttgcataattcctttgccagatcgatatcgaagccaaccagttcgccttgtgaattttttgattcaaatggcgcataggtcgggtcggtaccgatgcggatgttttgcggaatcgcagcaaacgccgcagttgcgctggagaaggccagaaccagagagagcgatagcaccagttttttcataatgtcctcaactgacagtctttttatagggaatatttacaggtttgttacacttatcgtgccataaaattgaccatcaaggcaaaatatcccgccccgttagacgtattatttttcattaaaaatgcttaagtatgcatttcaatgcaccacgatagtgcaacaaacctggcgtgcaccatgatgatcattccatcaggtacagcttcccagcgacgtatcagtcaccgtagacattaaagtcgaaatactttttcgccatcttgtcgtaggtgccgtcctgacgcagctcgccaagcgccttattgaaggcagccgtcagttcagcatcatctttacgtagccctacaccggtgccatcaccgaagtattttttgtcttttactgatgagccagcaaaggcgaaatctttaccagcaggttgcttgaggaatccttcgctggcagcaacttcatcttgtaacgcagcatccagacgtcctgcagccagatcggaatagaccaaatcctggttggcataggccaccacatccacgcctttactacgccaggtctcgttagcgtaagcttcctgggttgatccctgcagcacaccaacatgtttacctttcagtgaatccagcgttggctgaatcggtgaacctttggccgcaatcaaacgagaatctgcggcgtacagcttgtcggagaaggcaatctcctgctgacgtttatcggtaatggaaagcgacgaaataatagcgtcgatttttttcgctttcagtgaggggatcagcgcgtcaaagtcactggcaacccaggtacatttcacctgcatccgtttgcacatctcgttaccgagatcgatatcaaagccaacaaaatcacctttagcatctttcgatgagaacggtgcgtaggtggtatcggttccgatacgtaccgtctccggtagcgccgcatagctggaagccgctgtggagagaccgactaacaaagacagagcgagaatcgacttcttcatacataaccctcaagtgaaaatggcttttttatgttgtgtattgtgttgtgtgtttgcaggctctttcatgcaggtcttatgccatcttgacgacaacagtaacattcaacgttaaatatgttaataagacgttgcattattgtcctgaagttgaagatagcaggtatagcggttgaatcgcagcgtttcgattgaatggcagaaacaaaatgtcgaggatttgatcgcggttgcaaaattgccctgaaacagggcaacagcggagttatgcgccctgccagcgggcaaagagatcttcaggaagggttatcgcaaactggtcaagaacacgattaaccgtctgatttatcacatcatcaagggattgcgggcgatgataaaacgccggaacgggaggcataatcaccgcaccgatttctgccgcctgagtcattaaacgcagatggcctaagtgcaatggtgtttcacgcacgcagagcaccaacgggcgacgctctttcagcaccacatctgccgcacgggtcagtaagccatcagtatagctatggacaatgccggaaagggttttgattgaacagggtaaaatcaccatccccagcgtctggaaagaaccggaagagatgctggcggcaatatcgcgcgcatcgtgcgtgacatcggctaatgcctgcacttcgcgcagagaaaaatccgtttcgagggataaggtctggcgcgctgcctggctcatcaccagatgcgtttcgatatctgtgacatcgcgcagaacctgtaataagcgcacgccataaatcgcgccgctggcaccgctgatgcctacaatgagtcgtttcataaatagttgccctgtcagacttgcaggcagactttgcaggatttcggcgggagttgcaagtcagggtgccagaccggcaccctcagcgaaggcatcatccttcgttatgcatttcgagattttccacttcgttctgacgttgcactgctttggcgtcatcattacgtaacgtatcgaggaaatcgaggtagccctgatcaacatctttggtgacgtagacgccgttgaacaccgagcattcaaactgctggatatccggattttcagcgcgaacggcgtcgatcagatcgttcagatcctggaaaatcaacccgtcagcaccgatgatctggcgaatttcatcaacttcgcgaccgtgagcgatcagttccgtggcgctcggcatatcaataccataaacgttcgggaagcgaatttccggtgccgcagaagcgaggtacactttcttcgctccggcttcgcgtgccatctcgataatctgctcagaagtggtgccacggacgatggagtcgtcgaccagcaggacgtttttatcgcggaactcggcgcggttggcattcagtttacggcgcacggacttacgacgcagctgctggcccggcatgataaaggtgcggccaacatagcggtttttaacgaagccctggcggtacggtttgcccagaatacgagcaatttccagcgcgatatcacacgaggtttctgggatcgggatcaccacgtcgatatccagatcttcccattcgcgggcaattttctcgcccagtttcgtgcccatattcacacgcgcgctgtaaacggaaattttgtcgataaacgagtccgggcgggcaaagtatacatactcaaacaggcacggattgctgaccggattgtcagcacattgacgggtaaacaactgcccttcttcagtgatgtaaatcgcttcgcccggcgcgacgtcacgcaggaaatcaaagcccagcgtatcgagcgctacgctttcggaagcgaccatatattctgtacggttctcgtcaatatcacgttttcccagtaccagcggacgaatcccgtttggatcgcggaaagcaaccataccgtggccgataatcatcgccacacaggcatacgcgccgcggattaagcggtttgtggcagcaatggcagcgaaaatattgtcggcttccagcgggtagtggcggaagttgtccagctcgctggcgaagatattaagcagaatttccgagtcggaagtggtgttgatgtggcggcgtttttcttcaaacagttttttacgcaactcgtgagcgttggtcagattgccgttgtgggcaagcgtaatgccatacggggagttaacgtaaaacggctgcgcttcagaggcgctggagctgccagccgtggggtaacgcacatgaccaatgcccatattgccctgcaaacgctgcatatggcgagcttcaaatacatcgctcaccagcccgttcgctttacgcaaacggaagcagttattggcatctatggtgatgatgccggcggcatcctgaccgcgatgctgaagcaccgttaaggcatcataaatcgactggttaaccggcataacaccggcgataccgacaataccgcacatacgtctttttcctcgttaagccacatctcagagcacttacgctctgggcaagaaacttgacgagctttgcagataatcaaaaaaacatctgatgataaaactgaattgcgggatcagctgtgatttgctccagtcttcgcttttcgacaccccggtaaaggagtcgagaaagaagagaatggcagcaacaatcaacacaccgcgcaacgcaccgaaacagacgcccagcacccgatcggtgcctgacaaccccgttttctccaccaactggcctatcacgaagttcacgatagcaccaacgatcagggtagcgataaacagtaccgcgatggcaatcccatttcgaaccagttcgtcttcaaagcccgtaaaccagactgacaggtaagtgtagtaatgactggcaacaaagaaagcacaaccccatgtcaccagcgataacgcttcacgaacaaagccgcggatcaggctaaccagagaggaaaaagcaatcaccgcgattatggcgtaatcaatccagaccatatgtgtcccacgattttacgccctgtcatcctgttcggggcgcattctaacagaaaaagaaaacgtttgcgtagggatttccttcccgcgcatcaataaaaatggcgctgaaaaaatattcaacgccatcgactttttatgcctttgcggcatcgggcaatgcgtgtcggatgcggcgtaaacgccttatccgacctacggttctacccctgcgtaggcctgataagacgcgccagcgtcgcatcaggcaagaccgtattaattcggcgtatagcccattaccacgccacttaagccagaaagttgcttcaactcacccagcgaacctttcagcttatctttcgaggcatccggcccaaccagaatacgggtaattttaccctgcactggcgtggatggcgacgtataaacccgataaccggcaccgcgcagcttaccgacaatctcattcactttatcggcatttttcagcgcacccagttgcacaacataggctttacccgtcggtgcagctttttcttccacgaccggcttcggttctggcttcggcgcaggtggtgcttcaacctttggtttaggcggctccaccggtttcggcttcggtggggcgaccggtgcaggttccggttcaaactcggtgttattggctgcaatagtggccggatcgagcgacggtgctgcggcatcacctgcccgcacctcttccgctgcgccttccggcggctgcgtcggtaacgcctgggtggcggctggcatcatatcaggctcatcacgatcgcccgctttcggcaccagcgggatagccgcgaactcatcctgataatgttttttctgcccgtccagcagccctggaagtacaatcacccccagcgccaccagcacgatcgtgcccactaaccgattctgaaacttacttgccaccgcttctcctcgcgtcaatcacttccatgacatgtgcgaccgtgtggaaagaaccacacaccagcacggtgtcttccgctttagcgtccgccattgcggcatcccatgcctgcgcaacgctatcaaatgatttgccgttacccaaatgctcaagcagttgttctgccgtggcaccgcgcggcccttccagtggcgcacaataccagtcatcaaccacgcttttcaaccaggccagagttccggcaatatctttatcatgtagcataccgataaccgccagcacgcgcccgtttttcggtagcgctttcatacgcccggtgagatattccgccgcatgtggattatgcgcgacatcaaaaataacgcgtggcgactcgctcacaatctggaaacgtcccggcaaaattgcgctggcaatcccgtcgcgaatggcattttcactgacttccagcccgctggcacgcagtgccgccagcgctgttgcggcattcggttgcgggacaagcggcaacggcagattttccagcgtgccgtgagcatcgctaaacgcccagtcatgatcggtgacggaatagttccactcaacgccccgacgttgtaacagtgcacctttttcctgcgccacatcagcaatggtagaaggcatttccggctcaccgacaattgccggtttttcgctgcggaagatgcctgctttctcgcgaccaatactttcgcgatctggacccagccagtcggtatgatccagcgcaatactggttactaccgcgacatcggcgtcgacaatattggttgcgtccagacgaccgcccagccctacttccagaatcaccacgtcaagttgtgcctgcttgaacagccacaacgccgacagcgtaccgtactcgaaataggtcagggaaatatcaccgcgtgccgattcaatctccgcaaaagaggcggtgtgggccgattccggcaattcctggccctgcacacgtacgcgctcggtataacgcaccagatgaggcgaactgtagacgcccactttgtaccctgccgccatcagaatcgactccagcgtacggcaggtggtgcctttgccattcgtacccgcaacggtaaacacaaatggcgctggtttcaggacgccaagacgcgccgcgaccaggctcacgcgctcaaggccgagatcgatagttttactgtgcaggttttccagataagaaagccacgaagccagaggcgacgcggcttgaggagtgcgtttgataatcatggtatccgctgattcgttacggtgagaatagcaaaagggcagagccagtggccctgcccttatcagttatcaggcctcaggttcctgatccggtaccgggggtaccactacgccttcacgcggcgcttcaggattcggcgctggcagattcatcaacttcgccagaatgctcgccagtttcaggcgcatttccggacgacggacgatcatgtcgatcgcgcctttctcgatcaggaattcactgcgctggaatccaggcggcagtttttcgcgaacggtctgttcgataacacgcggaccggcaaagccgattaacgctttcggttcagcgatgttgagatcgcccagcatggcgaaacttgcagaaacaccgcccatcgtcgggtcggtcagcacggagatgtacggcaagccgcgctcctgcatttttgccagtgccgcagaggttttcgccatctgcatcagcgacatcagtgcttcctgcatacgtgcgccaccagaggcggagaagcagatcagcgggcagttatcttccagcgcctgctcaacggcacgcacgaaacgtgcacccacaacagaccccattgaaccgcccataaaggcgaactcgaatgccgcagcgacaaccggcattccatacagagtgcctttcatcaccaccagcgcatctttttcgccggtttctttctgcgcagatgccagacggtctttatacttcttggagtcacgaaacttcagcacatctttcggctcaagctcgctacccagctccacaaggcttccttcatctaacaggctatgcaggcgattacgcgctgtcatacgcatgtgatggtcacacttcggacagacctcaagattacgttccagctcagcgcggtataaaacctgaccgcagctatcacacttagtccacaccccttcaggaatgctcgccttgcgggtgggagtaatgttgcttttaattcgttcaatccagctcattagggacctttctgtctgaacctggttcgatgccagttttatctttggggacgcataatgccatttttgcccccaacagaccatgaatgttgcacattaaaacataacagcccgaaactttggataaaaaagtggtcgaaccgcggagttactttttattttgcggcgcgtgccgcagcgcgtttgtgacggattatttcgatgacgcccggcaaaatagaaaccacaataatcccgacgatcagcagcttaaggttatcctgaaccatcgggattgtaccgaagaaatagcctgcgtaggtaaaaagcagtacccacaacagtgcgccgatcacgttataagcggcgaaatgacggtacgacatgtggcccattcccgcaacaaacggggcgaacgttctgacgatcggcacaaaacgggcgagaataatcgttttgccgccatgtttctcataaaactgatgggttttgtcgagataactgcgacggaaaattttcgaattgggattactgaacaacttttcaccgaacaaccgcccgatagtgtaattgaccgcgtcacccacaatcgcggcgatcagcatcagcaccaccatcatatggacgttgagatcgttggtttccagtgatgccaacgctccggcaacaaacagcaatgaatcacccggtaaaaacggcgttaccaccagaccggtttcacagaacaaaattaagaacaaaatggcataaacccagacgccgtactccgcgaccagctctgccagatgcacgtcaatgtgcaggataaaatcgatgaggaaataaatcaggtccatatttgcctatgccttgtactcgtcatctttcaggctgtaactacgttggctacagcctgaaatgttccgagcattattctcgttagtccgccagaaatagcgggcccattggcggttttggaagatcataccggtcagggtaatccaccgcgaccagatacagcccttccgcttttgccgttgctgccgccagcgttctgtcctttgccgccagcaactctgctatccagctctccggctggttgtgggcaccgacttccatcaggctgccgacaatattcctgaccatatgatgtacaaaagcattcgctttaatatctaccaccacataaggaccgtgacgcgtgacattaatatgcataacgttgcgccacggggttcgggactggcactgcaccgcacggaacgaggtgaaatcattctcgcccagcaagcattgcgcagcccgatgcatccgttcagcgtccagcggttcgtaaaaatgggttacccctttactcagtaccgccgggcgcagccgatgattgtagatgatgtagcgataacggcgagccgtggcgctaaatcgggcatgaaaatcatcaggtacagttttaacccaacgcacagcgatgtcaccaggtaaattcgcatttacgcccaaggtccacgccgcgtctttgcgcagcgcggttgtttcgaaatgcacaacctgcccggtaccgtgtacccctgcgtcagtacgcccggcgcagaagacggtgatgggttcgttcgccacctgggagagcgccttttccagcttctcctgcacactgcggacttcgttctgccgttgccagccgtaatacttactgccgtcgtactcaatgcccagcgcaattttataaactggcggttgttgctggtcggacattagtacagatactcctgcaccagtttctcggcgatttttactgccatcagcgcgccgccaaagcgaacgttatcggccaccgaccagaactggacttgctccggcataccgtagtcattacgcacgcagccaacagaaagatgcggcgtacccgaagcatcacctacctgagttgggaattcgttctcttcagagagcacaatatcttcgccttgaacaaacgcatcacgcgcttcttctgctgccagtggacgcagagcttcaaagttgaccatctgggcatgaccgtagaataccggtgcctggacgacgctagccgaaatcatcagcccttcgtcctgcaggattttgcgtacttcgtcaacgatacgacgttcttcacgcacgctaccttcgctatccggcagtaacggcagcatgttgaacgccagctgacgcccgaagaaatcttcttcgtcaatcggaatgccgttgagcaatttcgcactctgccccgctaacgcatcgaccgcttttttgccctgggcggaggctgaaatcaggctggtaacgctgatacgtgataaaccgccctgatcgattaacggtttcagtgccgccagcagctggctggtcagactgtctggtacggcgatgacattccggttccggtaatctgtcagtacaaacgggtttacttccggcaccaccagcggtacgtcgggttcgagagcaaacaatccactgctgtcgatcaccaggcaacctgagttggtcgcttcttcaacccaggcagcggtagcttctttgcctgcgacaaaaaatgccagctgcgcctgcgtccagtcgaattcagcggcatcctgcacggtgattgtcttaccaccaaagcgcagttgttcgcctgcgctttcgttacgtgccagtgcataaatttccccaaccgggaactgacgttcagccagcgtttcaagcagggcttcgcccacagcgccagttgcgcccaggacggcaatgttccagccttcagacatggtggtttactccagaaatagcaaagctccctgccaatgttacagcagagagcatgaagaagagattaacgtgccggatgatgaacggcgttaaaacccagtttacacagcaatgatgccgcactggcgtcatcacaaattacatacagagatgaccattcacggcgctcaagatagtttttgcgcagtttatcgaactcacccggtatcccggcgactttacgcagcggtgcgtcatcgcggcgcacatcatacaccaaatgcaccagccttttcagcgtcggttgatcgagcgggccatgcagcgtaatgcgaccaaactctggcgcaggcagtaatgtatccagcgcaacgtgctgttcatgcccaataaacttgctataagcttcaaacacttgcgtagtaccgcgtgctttaccttccagggtatagcctgcgatatgcgacgtgccgatatccacttttttcagcagctcgacgttgagttccggttcgccttcccagacatccagcactacgcttaacttctggccttcattcaggcaggtcagcaacgcagtattatcgacgactgcgccacggcaggcgttaatcagaatcgctccgggcttcaggctacggatcagtttttcatccgccagatgtagcgttttgtacggaccatctttaaagagtggcgtatggaaagtcagaatatccgcgcgctggactaactcatccagcgagcggaaatcaccctcatccccacggtcggcgcgaggcggatcgcaaagtaaggttttaatccctaacgcttccagtcgcgcctgcaatcgacgtccaacgttaccaacgcccacgatccccaccgtacggtcgtacagtgaaaatccatcgcgttcggcaagcatcagcagggaggagaaaacatattccaccaccgcaatcgcattacagccaggtgcagcggaaaaaccaattcccgcctgcttcaaccatgcttcatcgacatggtcggtccccgcagtggcagtgccaacaaatttaatgggttttcctgccagcaaagattcattcactttcgtgaccgaacgcaccatcagcgcatccgcgtctgccagttgagcgacggggattggacgcccgggaaccgcggtcacctcacccaaacggctaaataagtcgcgggcataaggcatattttcatcaacaaggattttcacgtttgtgttacctgtatgagacgagagttaaccggacaagtgtgccataatctcgcggccaggcatacttgcgaagatttcaggtataaggatacgtaatgatacaacctatttccggccctcctcctgggcaaccaccaggtcagggagataatctgccgtctggcacgggcaatcagcctttatccagtcagcaacgtacttcgctggaaagcttaatgacgaaagtgacctcactgacgcaacagcaaagagcagaactgtgggcgggtatcaggcacgatattggtctgtcgggagattcaccgctgctttcgcgtcacttccctgccgctgagcataatctggcgcaacgtctgctggccgcgcaaaaaagccattctgcccgccagcttttagcgcaattaggggagtatttacgtctggggaataatcgtcaggcggtcacggattatatccgtcataactttggtcagacgccgctgaatcagctctcaccggagcaattaaaaaccattctcaccctgttgcaggaagggaagatggttattccgcaaccacagcagcgcgaggcgaccgaccgtcctttattaccggcggagcacaatgcgctaaaacagctggtgaccaaacttgcggcggcaacgggggaacccagcaaacagatctggcaatcgatgctggaactttccggggtgaaagatggcgagttaattccagcgaaactgtttaaccatctggtgacctggctacaggcgcgtcagacgctaagccagcaaaatacgccgacgctggaatcactacagatgacgctaaaacaacctttagatgccagtgaactggcggcgttatcggcatatatccagcaaaaatatggtctttctgcgcaatcatcgctttcttctgcccaggccgaggatattcttaatcagctttatcaacggcgggttaaagggattgatccgcgtgttatgcaaccgctgcttaatccttttccaccgatgatggacacgttgcaaaatatggcaacgcgtcccgcgctgtggatactgttagtcgcgattatcctgatgctggtctggctggttcgttaaccccgacgaaatgacagtatcgtgacaataatacccagcaccgcagagatcgccccggcaagaaataccgaagagtaaccaaacgtggtcgccagcattcccgccagcggcccggagacgccgagggcgatatcctgaaacgcggcgtaaccgcccagtgcggtgccgcgaacttgtgaggggacgcgtttaaccacctccacgcccagcgcaggaaagataagcgaacatccggctccggttaacgccgcgcccgctaatgcgacccatgcacctggggcttgccagagcagcaacaagcccaccgtttctacaagcagagagacaatcgccactttcacgccgccaaaacggtccggcatccagccaaacatgacgcgcatcacgacaaatgcgccgccaaacgcggtaagagtaaagcccgccatcgcccatcctttgctggcaaagtagagcgaaacgaaagtcccgataacagcaaaaccaacgccttgtagtgccagacctaaccctggtttccagataagcccgacaacgctccacagcgatggacgttctcccgccagggccggtactttgcgcactgtgccgttacaggcccacgccagtacgggtaataccattgtggtgatcgccagtgcggcaaaaccgtaatggctatgaatcaacaggccaagcggagcaccaacagcgagggcaccgtaaatcgccattccgttccatgacatcactttgccagagtgttttggccctacgatgcctagtccccaggtcagagcgcctgtcagtaactggctttcaccaaagccaagaatcaaacgcccgacgaccaacagagcaaatttgaacggtgcggagacaggcaaaatcgccgccagcagcaacgcgccgccagccagaccacaagctaacattccctgaagcgccgaacgttttgcaccatattgatcggccagtcgcccggcgtaaccacgcgtcagcaccgtagccagaaactgaatcccgacggcaatgccgaccatggtattgccatagcccagttcatgatgaacaaacagcgggataaccggcaacggcaaccctacggtcatgtaggtgagaaaaaccgcaaaagcgatgcggaagagcgaaaaattggcagaagatcgtgtttcggtttggcttacagcagtcatgcattactccagaatgcagcgcaaggcgaggagtatccccgtctcatctctctggtttcagggttacggtgcgttggcaggatttaacgcgtacgtcttttcagaaggaaatcgacaaagcgggaagtttgcctggaactggcggcgattgtcaatgatgtgaaaaagggaaccatcaggttcccttttgcgttagtgccggaggccgcattggcgcgtaacgtcggatgcgacgctggcgcgtctactccgacctactgcgaattaatctttcagcttgcgcattaccagcgtggcgttggtgccgccgaagccgaagctgttagacataacggtggtcagttcgcgatcggtcgtttcggtcacgatgttcagacccgcagcctgctcgtccagctcttcaatgttgatgctcggggcgataaagccgtgttccagcatcagcagagagtagatagcttcctgtacgccagcagcgcccagagagtgaccggtcatggctttggttgcagaaatcgccgggctcttatcgccgaacacttcacggatagctgccagctctttcacgtcgccaaccggagtcgaagtaccgtgggagttcaggtaatcgattggggtatcaacgccatgcatcgccatcttcatgcagcgtactgcgccttcgccagacggagcaaccatgtctgcaccatcagaggttgcgccgtagccaacgatttcagcatagatgtgagcaccacgcgccagcgcgtgttccagctcttcaaccactaccataccgccgccgccagcgataacgaaaccgtcacggtgagcgtcgtaagtacgggaggctttttccggggtgtcgttgtatttagtagacagcgcacccattgcgtcgaattcgcaagccatttcccagcacagctcttcgccgccgccagcaaacacgatgtcctgtttgcccagttggatctgctctactgcgttaccgatacagtgtgcggaagtcgcacacgcggagctgatggagtagttaacgccatgaattttaaacggggtggcgaggcaggcagaaacgccggatgccatcgctttggtgaccacatacgggccaaccgctttcaggccgcgcgggccgcgcattgcgtcagcgccgaacacctggaaacgcggggagccgccgccggaacctgcaatcaggccaacgcgcgggttattctggtaagcttccggagagaggcccgcatcagcgattgcctgctccatagaaaggaatgcataaatggatgcgtcgctcataaagcgcacaactttgcggtcaatgaggccagtggtatccagttttacgttgccccagacgtggctacgcatgccggaatccttcagctcctgagagaaagtgatccctgaacgtccttcacgcagagatgccaggacttcctgctggttattaccgatgctggaaacaatgcccaggccagtaatcactgcacgtttcattcaatacctctgtaagtcgcacatagagtaagtttcgaatgcacaatagcgtacacttgtacgccgaacaagtccgatcagccatttaatagagaaatttgcgcagccttacacacatcgctaagatcgagccaccgcctgtaagacgagtaacttacgtgaaacactactccatacaacctgccaacctcgaatttaatgctgagggtacacctgtttcccgagattttgacgatgtctatttttccaacgataacgggctggaagagacgcgttatgtttttctgggaggcaaccaattagaggtacgctttcctgagcatccacatcctctgtttgtggtagcagagagcggcttcggcaccggattaaacttcctgacgctatggcaggcatttgatcagtttcgcgaagcgcatccgcaagcgcaattacaacgcttacatttcattagttttgagaaatttcccctcacccgtgcggatttagccttagcgcatcaacactggccggaactggctccgtgggcagaacaacttcaggcgcagtggccaatgcccttgcccggttgccatcgtttattgctcgatgaaggccgcgtgacgctggatttatggtttggcgatattaacgaactgaccagccaactggacgattcgctaaatcaaaaagtagatgcctggtttctggacggctttgcgccagcgaaaaacccggatatgtggacgcaaaatctgtttaacgccatggcaaggttggcgcgtccgggcggcacgctggcgacatttacgtctgccggttttgtccgccgcggtttgcaggacgccggattcacgatgcaaaaacgtaagggctttgggcgcaaacgggaaatgctttgcggggtgatggaacagacattaccgctcccctgctccgcgccgtggtttaaccgcacgggcagcagcaaacgggaagcggcgattatcggcggtggtattgccagcgcgttgttgtcgctggcgctattacggcgcggctggcaggtaacgctttattgcgcggatgaggcccccgcactgggtgcttccggcaatcgccagggggcgctgtatccgttattaagcaaacacgatgaggcgctaaaccgctttttctctaatgcgtttacttttgctcgtcggttttacgaccaattacccgttaaatttgatcatgactggtgcggcgtcacgcagttaggctgggatgagaaaagccagcataaaatcgcacagatgttgtcaatggatttacccgcagaactggctgtagccgttgaggcaaatgcggttgaacaaattacgggcgttgcgacaaattgcagcggcattacttatccgcaaggtggttggctgtgcccagcagaactgacccgtaatgtgctggaactggcgcaacagcagggtttgcagatttattatcaatatcagttacagaatttatcccgtaaggatgactgttggttgttgaattttgcaggagatcagcaagcaacacacagcgtagtggtactggcgaacgggcatcaaatcagccgattcagccaaacgtcgactctcccggtgtattcggttgccgggcaggtcagccatattccgacaacgccggaattggcagagctgaagcaggtgctgtgctatgacggttatctcacgccacaaaatccggcgaatcaacatcattgtattggtgccagttatcatcgcggcagcgaagatacggcgtacagtgaggacgatcagcagcagaatcgccagcggttgattgattgtttcccgcaggcacagtgggcaaaagaggttgatgtcagtgataaagaggcgcgctgcggtgtgcgttgtgccacccgcgatcatctgccaatggtaggcaatgttcccgattatgaggcaacactcgtggaatatgcgtcgttggcggagcagaaagatgaggcggtaagcgcgccggtttttgacgatctctttatgtttgcggctttaggttctcgcggtttgtgttctgccccgctgtgtgccgagattctggcggcgcagatgagcgacgaaccgattccgatggatgccagtacgctggcggcgttaaacccgaatcggttatgggtgcggaaattgttgaagggtaaagcggttaaggcggggtaatctgctctcgcagtgtttgccggatgcggcgtgaacgccttatccgacctacgtgtgacgtgtaggcctgataagacgcgataagcgtcgcatcaggcatgctgctccagacgccgcaacttactgctgtgacgcctgctgaaacaggttttcccacatatcggtcaccagcgcctggtcacgcggcgacaattcaccagcaccaatggctttttccagactctggctaacggtcgtatgcaccgcctgagcggagtggtcatcaccactttccagttctgcgatggctaatgtcaggtggccacgcaaatacccactggcaaacaactcatcatcactggcatggtcaaccataccgtcgattaatgccagaatgcgtgattcaaactccgcgatcatcttctttcctcattgtaaaacgtggcgctggcttcagttgagcgcttccggccacgggaactgttccgccgtaagttccggcgtgtgataataattttgtagtgctttaatgaagcgtgccggacgttccggaatgccatttgtcagataatccatcacctgcgcatgtactcgccgttgaaacaccacacgatccggttcgaaatccccttccagattgtcgcaactgacgttaaacggatatcccgccgccacacagaacaaccagtcgagcgcctgcggcttcacttcaacatcttcaaactggctttgcgtttgggcatcgcgtccgtccgggcaataccagtagccgaaatcaaccagctcacggcgcgctttcccggcaatacaccagtgcgaaatctcatgaattgcgctggcataaaagccatgagcaaagacgattcggttatacggtacttccgcatcagcaggaagatagatcggttcgtcgtcgcctttaatcagacgggtattaaaatcatcggcaaagcagctattaaaaatttcaatcaactgctcgtagtggtgtgtactgttcattagttcatccccaaccagtggaggatctcctgtccgtggctgtcgtaaagtaatttggcactcatcaccgccgagacgataacaatcatcgggcggatcagcttttgtcctttgctcaacaccagtcgtgaacccatgcgcgcgccgaggaactgccccaccagcatgacaaagcccgtcgcccaaatcactttgccgccgagaataaacagcagtaaaccgccgatgtttgacgttgcgttgagtaatttggcgtgagccgtggctttggcgaggttaaatccgcacagcgtaacgaaggccagcgcgtaaaacgacccggcagccgggccaaagaatccatcataaaaaccgacgcagccaccggctattaacgcgaagggtaaaccgtacatccggcgctggcggtcttcttcacctagctttggcatcagcaagaaatagaggccgatacaaattaccagaatgggcaaaatctgccgtaagacatcagcctgaacgtattgcaccagcagtgcgccgctcattgagccgacaaaggtcatggcgatattgagtttctgatcgcttaaactaaccactttgcggcgaataaagtagatagtagcggaaatagagccgccgcaggcttgcagtttattggttgccagcgcattagcgggagacatccccgctgccatcaatgccggaatggtgagtaacccaccgccaccggcaatcgagtcgataaatcccgccagcatggcgacaaaaaagagaactcccagcaacagcggggaaaccataaacaggctattaaacgtttccattagatcacgtgctcatccagtagcgcctggcaggaaggcggcaacggaggcggtgtcttcttctcaggctttgttgttcccggttttggaggttcaaaccagctttgcagttctgccccgcaaccatcgcctgatggcggtaaaggttgatcttcacactccagactatcggcagggcaacgtaatcgtacatgcatatgcgcgcgatgctggaaccagggtcgcactttgcgcaaccagtcgcgatcggtgcccgcatcaaggcaaagttgttgtttaatcgccggattaacaaaaatgcgcgtgacgtctttgtcctgggcggcgagtttgatcaagctgaaaatttctggcttccacagcgtggagacaacgtgtttaccgtcgcgggaaactaagtccagtgcttgcgggcgcaagagctgcgcggaggtccagcgagttttcggcagttgcagaaagatatcgacatccagtccggtctggtggctggcatgaccgccgttgaaacgcccaccagcgggcatccccatatcgccaatcagcaccgtacccatgcccagattgctcacctggctactcagacgctggataaacatcaccagatccgggtgaccgaaatagcgacgctgatcggtacgcatgacctgataatgttcggactgtatcggcagcgtgtcagcgccgacaatacagccattagaaaaactgcctatcgattgtgcgctacccggcacaggttgggttattttttgccacggcgtcgctgccaggctggcgctactggcaagcagagccagcagcgcaatcgcggttttattcattttttaccagcgtggaatatcagtcttcacatcggcattttgcgcccgttgccgtaacaggtgatccattaaaacgatcgccagcatcgcttctgcgatcggcactgcgcggatcccgacacagggatcgtgacggcctttggtgatcatctcaacttcttcgccaaagcggttaatggtacgacccggcacggtaatgctggaggtcggtttcagcgccatatgggcaatgatttgctgcccgctgctgataccgccgagaatgccgcccgcatggttgctctggaaaccgtctttggtgatttcatcgcggttctggctgccgcgcagcgccaccacgtcaaagccgtcgccaatttccacgcctttcaccgcgttgatgctcatcagcgcatgggcgatgtcagcatccaggcggtcaaagaccggctcgccaagtccggcaggaacgccactggcaacaacggtgactttagcgccgatggagtcgccctcttttttcagcgcacgcatcaactcgtctaacgcgtcgattttgtcggggtccgggcaaaaaaacggattttgctcgacctgcgaccagtctttgatatccagcggaatgtcgcccatctgggtcaggcagccacggatttcaataccaaatttctcggcgagatattttttggcaatagctcctgccgccacgcgcatggcggtttcgcgggcggaagaacgtccaccgccgcgataatcgcgcagaccgtatttttgttcgtaggtgtaatcggcatggcctggacggaaaacgtccttaatcgcactgtaatcctgagagcgctggtcagtgttttcgatcaacaagccaatgctggtgccggtagtaacgccttcaaaaacaccggagagaattttgacctgatccggctcgcggcgctgggtggtatagcgcgatgtcccagggcgacgacggtcgaggtcatgttgcaggtccgcttccgtcagcggaatgcctggcggaacaccatcgacgatgcagccgagcgccagcccgtgcgattcgccgaaggtggttacgcgaaagagttgtccaattgtgtttccagccatcacggctccgttattgttgtgtttgcgtgtttacttaatctttataaatcgcgaaatgttctcgtgcggcaataagctgctctttggtgagcataaacacaccatcgccgccgttatcaaactccagccaggtgaacggaacatccggatattgttccataagatgtaccatgctgttgccgacttcacaaatcaacacgccatcatcagcaaggtaatctgccgcgttaccgagaatgcgacgcgtcagtttcaggccgtcagtgccagatgccaggcccagttccggctcgtggcggtattcgtttggcaggtcggacatatcttccgcatcgacatacggcgggttagtgacaatcaggtcgtactgcactttcggcaagtcgcggaacagatcggaacgaatcggaatgacgttgtggatcagaccgtgttcttcgatgttctgttcagcaaccgccagcgcgtctggagagatatccaccgcgtcgacttctgcatccgggaaggcataagcacaggcaatggcgatgcagccgctaccagtacacatatctaaaatatgctgcggttgcttgctgataagtccggcaaatttattgttgatcagttcaccaatcggcgagcgcggcaccagcacgcgttcatcgacgtaaaattcatggccgcagaaccacgctttgttggtcaggtaagccaccggaatgcgttcattgacgcggcggatcacgcgttcaacaatacggtgtttttcgctggaggtcagacgcgcggtgcgcatatcttccggaatatccagcggcaggtagagcgaaggcaacaccagctgtacggcttcatcccacgggttatcggtaccgtgaccgtaccagatatttgccgcgctgaagcggctcaccgaccagcgcaacatgtcctgaatggtttgcagctcatttactgcttcatcaacgaaaattttatccacgtattcctccagggcatgatcgcaataatttcggcggctagtttgccatgaagatgacgataaatcagcattcacgcgcggtgagtgaggaaaaatacgtttaaaacgatcgattgcgctacgagtcgggtaaactgtaggaaaattagaaatagagacagataaatgaaaaagaaaacaacacttagcgaggaggaccaggctctgtttcgccagttgatggcggggactcgcaagattaagcaggacacgattgtccaccgaccgcagcgtaaaaaaatcagcgaagtgccggtgaaacgcttgatccaggagcaggctgatgccagccattatttctccgatgagtttcagccgttattaaataccgaaggtccggtgaaatatgttcgcccggatgtcagccattttgaggcgaagaaactgcgccgtggcgattattcgccggagttgtttttggatttacacggtctgacgcagctgcaggccaagcaggaactgggggcgttgattgccgcctgccgccgtgaacatgtgttttgcgcctgcgtgatgcatgggcacgggaagcatattttgaagcaacaaacaccgctgtggctggcacaacatccgcatgtgatggcctttcatcaggcaccaaaagagtatggcggtgatgcggcgttgttggtgttgattgaagtcgaagagtggctgccgccggagttgccctgaggagttgagcgcgttgcgccaggtacgggtaatggcaggggcgaatgcccctgcctggtgtatctaagggctacaactcattcagtatgtactggaaccggcaagtagaatcgattggctgcatactgctggtatcaacacgcacgaccatatcgtgtaactgtttgtccgttatagggtgtcgatttggcgtgaccgagacttccgccttgtcacatcccgacgcggtaaaagttatcatctgtgcaacccagcggcagtaaccacctgtttcattcatctgcgtactgtcgcacaacttcccatctttcatcaaatacgttgaaagcgttttctcaaccacaccgcccgtcgactgcagggtgagcagttttgacttactgacataattctcattccatgaaacgtcataaggttgaacagaaacggatggacaaatcgtgtcgtgactatcaggcccctgatacgtcacgccccctggagaggcttcagagtcattcataataaccaaccatggacaagaaaagtaagattcaatctctgcagagacaataacctcaaatgtataatacccgcagttccacccagacggtaatccaggacaacttgctttgttgatattttgatggtagccaatcagcttaaccgaaggggcaggaggaggaccactccagctcacattttgcaatatttccccagtcatgagccattgactacttttatattcaccaacgtacactgcggatggcatcattatttttaaattaaaagtcgcaatattacgcgaatcaccgttgtaaccgtagtaaacgtcaacgctatgcccggcagccatagcttctgtagtagcaataagcatgaccagagcgaacaaccatcgtagtattttcattttaaatatactcaaatgtcgcagttaaagaggcggtaaattcaccgatcgtcacatcacggccgcttttcgcctgtagccaggctctgaaattgatatcgttattgccattggttagcgcaaaggtcgccccatttgtattgttgatggcaacctgcattccgtcggttttttccatgccaattcccactccctgagcggttgatgacgtatccagtgccagaaaaccgggttgttcgctgtcttctacccccgtgagcgtgacttttacgttgtatcccgccggccctttgcaatctttcagcttaaagactacgggtacacgagcggactggcctgcaacgttcaaatcctgacgactgaccgtgggaaagcgcacctctgccagatattggccatccaccaccagcgcacaggatttacttaataaattaccggagaaatgcagattattatctgccgcgaataacgtgctactcattgccaatatcagccccgctaacaggacgtaaccaccggactgaatcattgatttattcattgataatccacccgtaatgttgcgtaagccgaaaaattcgtatcgcttaacacagcatcactcgcttttaccggtacggcctccagcttcggcttttgcgtaaaatcagtggcgttgatagcaagcggagtattgagtttaaaacgctgaccatcgtgctgaagctcgataccaaaaccgggtacatcagtttcaattgctgcatcattaaaactggtttgtgtaccagtccaggtgagggtcatctcccaatctggatgacgggtcgtcgagtcacaagtgagttcatatggcacctctttacgaccatagttgccgttgatgtcgtcgataatgagatcgcgaaattcgacttcaatggttttaccaccgctgatgctacaggttggcggtgacaataatgtcccgtgaaaggtgatgtcttcatcagcagcatgagctatggcgctactgacacaaagcagggttaagaaagtctttctcattgatagtccaccaccatggtcaaactggcgttaaactcgcccgcagcaagttgcgccccgcttgccttcacaggtacagccttcaactgtggctggttattgatattaaatggcgtccagctattttcaccgacggcaaacaatgagttatcggcgctattttctatccgaatgcccagcccggtgatattggtactgagtaccgtttcgccgttaatcgttgaggtattgcccttaagttgcatccgcaagtcgttagcaagactgtttgtgcagttcaacgtgtatttcgcatcttgccgataattggtgccatcaacgttatcagcaatcatattgccgaactctacctggctgcccttgattgaacagggtggcggagcatcgaccaacacgcgcagaattaaatccacgggtttactaccagccatagcagataaactacagacactgcataccagcagccctgcgcccactacaaacttttgactcataactccccccgtcatcagcctttgcggctctgctcttcatccacctggcagctgttgccattgcactggaagaacagcggcatccgtgcgccaaagtcgttgacgtaagtcagcaccggtacgctatccattttcacattcagcggtaccgtggttttcggctcaatgaccagaggcgagaaccctgcagctggattaccgtttttctgcgcactggcgttgctgataatcacgtagtacggcgttgggttattgacggtaaatgcctgaccgctgcgggtgagcgtcaccttgtgctgccacggacttttcatactgaccttttccagcgcctttggtcgccagaacaacttgatacgcgtttgcagcgcgatttgcagggtattgggtttgtttgattttggcgggatctcgcgcacgttaaagtagaacatgctttcacgatcggctggcaatttgttgatatccggcattccctgcacttttacctgcccgttcatcattgaatcgatgcgttgcactggcggcagcacagttaacggcgaggtgatcttgttacccttttcatcttcaatccagctttgagccagataagggagtttcggatcgttattacgcagcgtcacgctgattgatttgtcgctttcattaaatatcaaacgggtacgatctggcgttacagacgccagggcagacaaactggtagcgctaagcagtaacgccagcgtcatagcacccaatttggcagagcaaagtaaatcagacatggatcattccttaatcacgttattggttagctgaaacagaaacagggggatcggtgggtgtcacctgttgcgtctgctcctgaatgacaggctttatgtcatcaggaacaaccggcgcgacgttgcctttatgctggcatggcagtaacaagccgttaaacagatcggcaggcagcgggtccggcaggttgatatcgcaatgcgcaacaccactccagaacacactcatatgttcgccaggtttcaccccagccagatagacactaccgtcatcatcgacaaggcccactgtctgctcgttatcattttttacttctgcgccaaacggtggatggctgccatcttgtaaacgcagcaccgccatcgctttttgaccactgatgacggcaaatttgcggtagccaatggctccttcagttagcgtggcttgcaccaccgactgggttgcttcggcgttttccggcaatttgttgaggtcgatatacgcctgattgcgataataattgttaacgtcagaaacgacggctttaccaaacatattggtataaacagcagccccgttaccttccaccggaacatcggcaacgccatcggcatcaatcagcaggcgtgtcccgcccatattctgggtacggtgaagtgcgccgccgtgggtagtaagcgttgcgccgccctgtaacgacaagcccgcagaggtgtattgcccttcatggtagttcgcactgaggtcaacctgcgccagcgaaccatcatggctgtagtagccatcaacgctggtgtgtttgtcactggtgccgatgttcaactgatagtgagtcgcgtcatcgacacggctaaaataaccgacctggctgctgtccgtcccactgccatagttgccgttatagctaacggtactgttgtcgccccacggcatactgagcgaaatctacatgcccttatccgcccggttgtcatactcgtagcggtagccagtcagggaaacgctcatattacgaatgctgcccatattgaaatagtgggagagcatgatgttgtagtttgtctgctcctcacgatcccagtaggtatggcgggtatagttgagataaaccgaaacacccgcatcgcggaagttctggttataagtggcggtgtacatctctttgtcgttgcccgtacggaccatttcgctgtcactggcatccagatactcgctcatggtcataaagttctcttccgagaagcgatatccagcgaaagtgacgcggctgttgagctggtcaaagtctttggaataactcacacggaaggagttaccgtccagcgaacctttgccataagcggtgtctttatccagtttggtatgcgaatgagtaacatcaaacgcgaccgcgccgaaggtagacaaatcgcgaccgacgcccagcgccgcagactgatagttttcatcacccagcgcaccgccatataacgaccagccgttagcgatgccccaggaggcttcagcaccagagaaaaatcccccctcgacatggtggccccactcttgcggacgtcccatcatgatcttatagcgaacctggcctgggcgagtgaggtatggcatcgaggcggtgctgatgtcatattcctgcacctggccgttctgttcttcaatgcgaatatgcaacgtaccggagacggaatcaccaagatcctgaatacgaaacggtccagccggaacctgcgtttcgtaaatcacacgccccatctggctgacggtcacttttgctgtggtgtgtgccacgccggaaatgtctggcgcgtagccgcgcagattgggaggcaacatttgatcgtcagtgctgacactgccaccaacataattaaaaccgtcgaaaatatcggaattgaggtaatcttcgcccagcgccagtttggcttttaatgacggtaacgcccgccaggcataatagcgactccactcccattttttttgtgtgtcatcgccgccaaattcatcgtcatcatcattactgcgcgtatgttgatagttggtctgccagtcagcgcgcatacgccatggccccaggttaaccccgaccgtcccgttgccgctgatctcgttactgtcatcgccgccattttcttcgtgtcgtgtttgcgcagtgatgctgtagtccgcaatgatcccggagatgccatcatcccaacgagaaggtggatcccagtcgggccaggtatattcgaggtaagcctgcggtagtgaaatgactaatgcggactggcttaaatcagccttaatttccacgccttccagttgaccgggcttcaggcatttaccatcgtggctccattgcagatttttcgccacgtcttcttttaaaccaaactgcgccaccagttccggtgtcagacaagcatagcttttgctaacgtcatcttcaccagcataccagtaaatatcgtactcttccgccaatggctgtttatttagttgaacctgtaaattgtattttccgggctcaacatacccctggctggaaaaacgcttcagatcaatttttgtgtcgccttttaattccagaaaacgggaatcaaactgaatgtcgtcttcagcccagacactgctataactccctgacattgccagcgcaatgcaccacggaagaatccgtaatcgaaaaagagaatggtcaggcatacacgtttttatccgtttttattcttgttcggtcaaaatccatttaaataccccatagcagtgtcgctatgggggtatgccttacaggtaagtaatctggaaggtggtatttgcttcgaaattacccagatctggcgcatcagctgcgccgaccagccaggctttaaagttcagagtctgcttcgctttgcctttattagtggcagtatctttcacgattttctggtcaatacccatgccgcttttgtaagaggtacccagagagtcaccgatcgccaggctaacattgttaaatgccgcaccggtatcggtattgaaaatggtgtaataattgccgctatttgcagaagaaacggtaccagtaaaggtagtggtcattgtttcctgagtatcaaatacgcaatcttgcaggcgaatctggaaatttttcggcgtggtggtgccgttatttttcagtttttcggcaccgatatcacccatatcaacttccagtttgtgatcgtccggaacgatagaacacactgagtcttcaatggtgccgtaaaaacgtgcagtaccgttgttacccgcagcgattgttgccgtagaggtgaacgcgcccatcaccattgccgcagcaatagctgttttaacaaacttactcattatttgtccttaaactataaataattaaaatataaacattgcaatacattgattcagtcaatagccaatgtttatacccagccattgaatacggcatgcgatccaaaaaaacaggtcgtaaaaaatgtattcgttggtgtggggtcgaatagtgatgttttcactcccctgattcaatttaattttactaatgagtaaatgtagatttaattaatatattgataggggaaagattatcttaaggatcttctaaaaaaacacgaaatatatatttagaaaaaacaggaagcatatcaacaatgaatgccaatagcttaaaaaacaaacaatgaacatataatgcgattggcattaacccgcttttgtcgatataatatataaacactatagccagaatttaatcaagtttcaattacgtcctgcctgattattcaactctattttctccattatctgtattaataaatgataatgagtgtcaaacagacattattcatttcaacatgtaactttgggcaaaatcaagatacgcgcagaagaatactttccgaatgaaagttaaaggtgttttatttatagatggggagagtcttcgatagtagtgaggttgacagatatccgctgcctgatgagcaattatgcccaatgaatctacctcattgggcataatttggaactcatcagatagcttttgccatcttcagattacacgggctcatctgccagttgaatgtgccgtttccgctttcatcaagcgttacgctggcaatggccgaggtggtaaacataggcggcgtttcgcccggacataactcggcaaccagatacccgactaacggtaagtgagagatcaccagtaccgaagcaacaccttcattggtcaacgcctgcaaataggcactgaccagaccaacatcgccgcagggcgttaactccggcagaacttctgcactggaaggcaggttcagacaatcccctacttcttccagtgtttgctcggctcgcaggaacgggctcaccagaacgcgttcgatttccactttttgacctttcagccagttcgccatcaggcgagattcgtcacaaccattagtggtcagaggacgaacggaatcactggcggcatcgagggctgcgtcgccgtgacgcatgataaaaacttgcatattgcaccgcttttgttaaccagattcgcccgttttctttcatctgaaaccagagaaagaaaacggtggccggcattgtgccttatccattcaccgaatgaaacgctgttttttacctcaatggcgtaagtatagtcaatatgcgtttacattttgaccaacactccgccattcagcgcggattcatatagctttgaccttcttattgcaggtcagttgcagttgttttccaaaaactttccccacgcgcgcccatctcgaccaaacgctcgcaaggggtaaaacgggaaccatactgcgtggcaagtcgttgcattattgcaaccacttcgcccgcgccgagagaatcgatatagcggaacggtccaccgagaaatggcggaaaaccaatgccaaataccgcgccaatatccccgtcacgcacgctacggataacctgctcatcaacacaacgtactgcttcattcagcatcaacatcacacaccgttcagcaacctgcggtgcggagattcgcccctgcccttgtgtgccaatcagcgggtaaatggcgggatcgacctgttttttgcttttacgccctttctgaccataaagatagaaaccccggccattttttctgcctttgcgatcgtcgttcaaaattgaagaaacaacatttgcaggcgcgctaaaacgttctccataagcggcttccagtacaggaataattttagtcccggtgtcgattcctacctcatccaaaagttggattgggcctaccggaaaaccaaatttcactagcgcggcatcaatgtgctctacccgttcaccttgggtcaacatgcggatagcttcattaatgtaaggcgctaagatgcgattgacgtaaaaaccggctttgtcacgcacgacaattggcgttttaccctgttttttcgccagttttactgtggtagcgatggtttgcgccgatgtccccgcatgaggaataatctccaccagcggcattttttccaccggactgaagaaatgcaggccgataacttgctcaggtcgcgtggcgtgagcggcgatatcaccaatcggtaaagatgacgtattcgaagcaaagatggtatgagcggcgcaattttgctcaacttccgccaccatctgttgtttcaattcgagattttcaaacaccgcttcaataatcagatcgcgatgggcaaagccgcgatagtccgtcgttccggagattaatgccagctgtttgtcacgttcgctggctttgagatgacgacggcgaactttgccctccagctgatcccaactgtacttcagcgcatgatttatgccctgcgggttgatatctttaattctgaccggaatccccgctttacaagcagtgacataagcaataccgccgcccatcaagccaccacctaaaatccccacgctgtttaatggcgcaggcggcgcatcactgccgggatctttcttcacgtccgtactggcaaaaaagatactacgcagcgcctgcgattgtggcgtcatcgccagttcgccaaacgcccgagcttcggcgtcataaccgctgctggtgccctgcgctaatcccgtttcaacaacctccaggatgcgttctgtcgccggataattgccttgagttttgtgttctgttttcttgccgaccattttgaacagcagcgcacgacctaacggccccgccagaatacgctcgcgtacaggtagagggcgggaagatgggcgctccttctttgccagctcaacagcggcttccagcagaatggagtgcggaacaacgtcatccaccagccccagctttaatgcctgtttcgcccgaagttgttttccggtgaggatcatctctaatgctgtgctgacgcctatcagacgcggtaaacgctgggtgccgcctgaaccgggtaacaatccaagttgtacttcaggcaaaccgagcaccgttttaggatcgtcagtacaaacgcgaccgtggcacgccagcgccaactccagcccaccacccaggcaagcgccatgaatagccgcgataacctgaatgggcaaagcatgaatctccgccatcaactgttggccctgccgcgccagagcttccgcttcttgcgccgttttgcagttgccgatcatgttgatgtctgcgccagcaatgaagttgtccggtttagcggagacaaacaccacgcctcgcaactctttgttttcacggagttgcttaataatggcgcgcacctgcgaggcaaactccgccttcagggtattcattttctcacccggtacgtcgatggtgataacggcaatgttgtccagacgaacattaagggtaaacgctgatgtcatttccattattccgcctccagaaccattgccgcgccaagcccaccggcagcacaggcggtaactaaaccaaatccaccgccgcgacggcgaagttcatgcaatgtctgggtaatcatccgcgcgccggtcgccgcgaagggatgcccgtaagcaatcgaaccgccaagcacgttaaatttgctatcgtccacttcgccagtggcatgtgcacgccccagtgcttcacgagcaaaacgttcactacccagcaactgaatattcgccagcgtctgagctgcaaaggcttcgtgcatatcgatcaatgtcagatcgctcatcgtcaaaccggcacgctccagcgccagcggtgttgaccaggctggaccgagcaacatgtcctgccagacatcaatcgcagtaaatgcgtagctgcgcagataccccagcggcaccagccctaattctttcgcccgggattcagtcatcaggatcaccgctgccgcgccatcggtcagcggcgtactgtttgccgccgttaccgttccgtgtttgcgatcaaacgccgggcgcagctttgcgtaatcggcaagcgaggaattaccgcgaatattgttgtcttcgacaagcggttgtttataaggagggataaaggcagtcatcacctcttctttgagttttccgtctgaccatgcctgagcggcacgctgatgcgaacggtgcgctaatgcatcttgctgttctcgggtgatgccgtaggttttcgccatttgctctgcggtgtcgcccatccgcaagccggtagaatattctgctaccgcaggtggtacgggcattaagtcgcgcaaacgcaggcgagagaagagtttcagtcgctggctcatggtacgagctttgttgacatcaaccagcacgcgcgccagttttttactgacgccaattggcaataccgaagaggaatctgccccaccggcaatccccgctcgaatagttcccgccatcaggctttctgcgacgtttgcaactgcctggaaactggtagcgcaagcgcggctgacgctgtaagcatcggtatgtacattcattcccgtaccgagaacaatttcacgcgcaatgttgggggcttcaggcatttgtacgacctgaccaaagaccagttgttcaatcacttcggcggggatctcgctgcgtgccagcagttcgcctaccaccatcttccctaaatcaaccgcgggaatgccatgaaaagccgtcgcctgacgggcaaaaggcgtacgtaaaccgctaacaatggcgatacgatcgccctggcgggtaaccagcggtaaaacctgacccataacactcccctgtaaaaaaataaataaagtggtctgacctgatcatagtcttaaccatttttttacatttagccaagtggagaaaagggaaagtgggagctatgacacagagagaaaagaagaagagaaaagaaaacgcccctgccagcaactgacaggggcgtacgtacccgagaggaattaacgcagacccagctggaaaatcagcatttcagcttcgcaggcaaaagtgaaatcgatatccaggcgcacaccgtcagactcttcagtgaaagtcggggtgattttgcaaggttcagattccacgctacgggctttttcagtcagcgccgccagcgtttgctctgcttctgcgcggtttgcaaacacgcggctgtaagacgcggtgcagtcggagttgtccataatggtgccaacatccatacagcagcaaaccggggtttcatcagcactacatttactcatcgttgatttcctctgtatgtgcacccaaggtgccagataaacgttgtggatattttacgcttccggaaagtgctgctccagttgttaattctgcaaaatcggataagtgaccgaaatcacacttaaaaatgatctaaaacaaaattcacccgaatccatgagtgcgccacctccaaattttgccagctggatcgcgtttcttagatcatatttgaaaaaagatagaaacatacttgcaacattccagctggtccgacctatactctcgccactggtctgatttctaagatgtacctcagaccctacacttcgcgctcctgttacagcacgtaacatagtttgtataaaaataaatcattgaggttatggtcatgagccagaaaaccctgtttacaaagtctgctctcgcagtcgcagtggcacttatctccacccaggcctggtcggcaggctttcagttaaacgaattttcttcctctggcctgggccgggcttattcaggggaaggcgcaattgccgatgatgcaggtaacgtcagccgtaaccccgcattgattactatgtttgaccgcccgacattttctgcgggtgcggtttatattgacccggatgtaaatatcagcggaacgtctccatctggtcgtagcctgaaagccgataacatcgcgcctacggcatgggttccgaacatgcactttgttgcaccgattaacgaccaatttggttggggcgcttctattacctctaactatggtctggctacagagtttaacgatacttatgcaggcggctctgtcgggggtacaaccgaccttgaaaccatgaacctgaacttaagcggtgcgtatcgcttaaataatgcatggagctttggtcttggtttcaacgccgtctacgctcgcgcgaaaattgaacgtttcgcaggcgatctggggcagttggttgctggccaaattatgcaatctcctgctggccaaactcagcaagggcaagcattggcagctaccgccaacggtattgacagtaataccaaaatcgctcatctgaacggtaaccagtggggctttggctggaacgccggaatcctgtatgaactggataaaaataaccgctatgcactgacctaccgttctgaagtgaaaattgacttcaaaggtaactacagcagcgatcttaatcgtgcgtttaataactacggtttgccaattcctaccgcgacaggtggcgcaacgcaatcgggttatctgacgctgaacctgcctgaaatgtgggaagtgtcaggttataaccgtgttgatccacagtgggcgattcactatagcctggcttacaccagctggagtcagttccagcagctgaaagcgacctcaaccagtggcgacacgctgttccagaaacatgaaggctttaaagatgcttaccgcatcgcgttgggtaccacttattactacgatgataactggaccttccgtaccggtatcgcctttgatgacagcccagttcctgcacagaatcgttctatctccattccggaccaggaccgtttctggctgagtgcaggtacgacttacgcatttaataaagatgcttcagtcgacgttggtgtttcttatatgcacggtcagagcgtgaaaattaacgaaggcccataccagttcgagtctgaaggtaaagcctggctgttcggtactaactttaactacgcgttctgataacgcgttcgcctggataaagtcacctgcatagcaggtgactttaactcccccacttcaccgaaagtagtgtcctcattgcttacctcctgagttttgcaaacagcctgttggcagcttgccctttcaaatcaataagcggtatccacagacaaacctgaagggaaaggcatattttcaggcgttctgctcgtccttctcaaagagtttacttttctgcatttccaggatactccccccccctggctattgtgcgctcatacactcaaattaaagataggttctaaataaatgagcgttttttgatagtctatttcattaggtaatatatatttgtaacaaatcaatcaaaatggaataaaatcatgctaccatctatttcaatcaacaataccagcgcagcttacccagaatccatcaatgaaaataacaatgatgaagttaatggattagtacaagagttcaaaaacctttttaatggtaaggaaggaataagcacctgtattaaacatctacttgagcttataaaaaacgccatacgagtaaacgacgatccttatagatttaatattaataattcctcagttacttatattgatattgactccaatgatacagaccatattactattggtatcgacaaccaagaaccaatagaattacctgcgaactataaagacaaagaactcgtccgtactatcattaatgacaacatagttgagaagactcatgatatcaataacaaggaaatgatcttcagcgcattaaaagaaatatatgatggagatcctggttttatcttcgataagatatcacacaaactcagacatacggtaacggaatttgatgagagcgggaaaagcgaaccaacggacttatttacctggtacggtaaagataaaaaaggcgactctctcgctattgtaattaaaaataaaaacggaaatgattacttatctctcggttactacgatcaggacgactaccacattcaaagaggaattcgtattaatggtgatagtctcacccaatattgtagtgaaaacgccaggagtgcttcagcgtggtttgaaagcagtaaagctatcatggcagaatcatttgcaactggttccgatcatcaggttgtaaacgagctcaacggggaaagactgagagaaccaaacgacgtttttaaacgttatggtcgagcaataagatatgattttcaagtggacgatgcaaaatataaatgcgaccatctaaaagaaatagtttctactttagtcggtaacaaaattaacgttggccattctcaaaaaatatataagcattttaaggatctcgaaggtaaaattgaagaaaggcttcaaaatcgccaggctgaatatcaaaatgaaattaatcaaccatctgcgccaggtgttaattttgatgatatttaaaattatttttccagttttttgatttttcaacagctgaatatcggaaatagtcagtgacgaacatcagtatttttacataattacgtctaggtcattgtcggtttatctccttttacttgtggtaattgagggataacaacaaaaaaggtgagttttgcgactcaccttttttatttgtttcttattcagaatcaatatcttttaaatcatcctgaatcgcttgtgcgttcggattttcctgcggtttgagttcgccgccattagcgatgaaatcatgacgctggaagtacgcttcgcgcaccataatataaggatcggacgactgacgcagcagaccatcggaatccagcagctgagcgcgggtttcgatcccttcaagcgtccatttacccacagacatcggccaggtcagccaggaaagaaccgggtaaaaaccatccgccatatcaccaccgtcatcacgcagcgtgaagctaccgtagaacggtaactgaacgtaaggcccataacccacgccataatgaccaagcgtactaccgaagcggtgaggttcagtccgttgcagtttcgggttcgccatccctgcaacatcaataaaaccgcccatccccaaaatggtgttcaggaaaaagcgggtaaagtggaccatcccctgataagggtcgccctgcaagaagtagttaaccatcaccgcaggttcttcaaggttgccagtaaagttgctcaaaccgttacgcgccggttgcggaacataatcacgccaggcgacagcgaccggtcgaacaatatacgggtctaatacattgaagttgaagttgtacatggtgcggttgaacccttctaacgggtcagaacgcccttgctgatctgtaccggaactcgcacaccccaccagaagcgtagttcccagagcaagcgccgacaggcgaagcttcataaatgtctccctgtttttttatggcttatgcagtttgccatccatgacggaacgataccgtatccgcctgtttaggtgtgggcgattgtaacagcacgtcaactgatgtccagacgccctgatttgctgatttgatcatagcctggtaatcgccgccctgtaggctacttgattctatagaaacagaaaaaggcaaacgcagccttttctacattttcagagtaactcccgtcagttgcgagcaaaaaagccgctacgctttagctatacgtgctaattcaagagaagagaccatggacaacgacaaaattgatcaacacagcgacgaaattgaagttgagagcgaagaaaaagagcgcggcaaaaaaatagaaatagatgaagaccgactcccctcccgggcgatggcaattcatgagcatatccgccaggatggtgaaaaagagctggaacgcgacgcaatggcgctactgtggtcagccattgcggcgggtctgtcgatgggcgcttcgttactggcaaaagggatatttcaagtcgaactggaaggtgtgccgggcagcttcttgctggagaatctcggttatacctttggttttattatcgtcattatggcccgccagcaattatttaccgaaaataccgtgactgcggtactacccgtcatgcaaaaaccgacaatgagcaacgtcggcttacttatacggttatggggcgtcgtgctgctgggtaatattctcgggacaggtattgcggcgtgggcatttgaatatatgcctatcttcaatgaagaaactcgcgatgcatttgtcaaaatcggcatggatgtgatgaagaacacccccagcgagatgtttgccaacgcgatcatttccggctggctgatcgccactatggtttggatgtttcctgcagcgggtgcggcaaagattgtggtgattatattgatgacctggcttattgccctgggtgacaccacccatatcgtggtcggttctgttgaaatcctctatctggtgtttaacggtacgctgcactggagcgatttcatctggcccttcgcactacctactttagcggggaacatctgcggcggcacctttatcttcgcgttaatgagtcatgcacagattcgtaacgacatgagcaataagcgtaaagcagaagcacgccaaaaagcagaacgtgcggaaaacattaagaaaaattataaaaacccggcataaatggcgagggtttaagcaatcgagcggcagcgtacttaccccgcactccattagcgggtatactcatgccgcattgtcctcttagttaaatggatataacgagcccctcctaagggctaattgcaggttcgattcctgcaggggacaccatttatcagttcgctcccatccgtaccagtccgcaaaatcccctgaatatcaagcattccgtagatttacagttcgtcatggttcgcttcagatcgttgacagccgcactccatgacgggtaaaaagtggataaaataattttacccaccggatttttacccatgctcaccgttaagcagattgaagcagcaaagccgaaagaaaaaccataccgccttctcgatggtaatggcctgtacctttatgtccctgtgtcagggaaaaaggtatggcagcttcgctacaagattgacggtaaggagaaaatcctgaccgtcggaaaatatccgcttatgactttgcaggaggcaagggataaagcatggactgcgaggaaagacatctcggttggcatcgatcctgtaaaggcgaaaaaggcttcgtctaacaacaattcctttagtgcgatttacaaggaatggtacgagcacaagaagcaagtatggtcagtagggtatgcaactgaacttgccaaaatgtttgacgacgacattttacctatcattggcggccttgaaattcaggatattgagccgatgcaactgctggaagtaatccgcaggtttgaagatcgcggtgcaatggaacgagccaacaaagcacgcagaagatgcggcgaggttttccgttacgctattgtcaccggaagggctaaatataacccggcacctgaccttgctgacgccatgaagggataccgcaagaagaacttcccgtttcttcctgcagaccagatcccggcattcaacaaagcactggcaacattttcaggaagtatcgtatcgctcattgcgaccaaagttttacgctacacagccctaagaacgaaagagcttcgttccatgctatggaagaacgtcgattttgaaaataggattatcaccatcgacgccagtgtgatgaaaggacgcaaaattcatgtggttcctatgtcagaccaggtagttgaacttctcactacgctaagctccatcaccaaaccagtctcagagtttgtttttgccgggcgcaacgataagaagaagccaatctgcgagaacgcggtactgcttgtgatcaaacaaatcggctatgagggtctggaaagcggtcacggattcaggcatgaattcagcacgattatgaacgagcacgaatggcctgctgacgctattgaagtgcaactggcacatgcaaacggcggatctgtgcgtgggatttacaaccatgctcagtatctcgataaacgcagagaaatgatgcaatggtgggcggactggcttgatgagaaggtggagtgagcgaccttaacaactatcgaatagcacaaagtcttgcaatccagtgcaaagctttgtgtgtataagttttgtctcatcaaccacagcaagtatcgatcgattaagacttggatgatagacttcattcctttgattattagctgatagaagaaatgttaaagctatttgcaaagtacacctctattggtgtgctgaacacccttatacactgggtggtttttggtgtttgtatctatgtcgcgcatacaaaccaagctcttgcaaacttcgcaggtttcgttgtggctgtgagctttagcttcttcgcgaatgcaaaattcacattcaaggcatcgactacaacgatgcgctacatgctatatgttgggttcatggggacactgagtgctactgttggatgggctgctgatagatgcgcacttcccccgatgataactcttgtcaccttctccgccatcagcctggtgtgcggtttcgtctattcaaagttcattgtctttagggatgcgaaatgaagatatctcttgtagttcctgtcttcaatgaagaagaagcgataccaattttttataaaacggtacgtgaattcgaagaattgaagtcatatgaagtggaaatcgttttcataaatgacggcagcaaagacgctacggagtcaatcattaatgctctggctgtttcagatcctctagttgttccgctgtcatttacacgcaactttggtaaagaaccagcattgtttgcagggttagaccatgcaaccggggatgcgataatcccaattgatgttgacctgcaagacccgattgaggttattcctcatcttattgaaaaatggcaagcaggtgctgatatggttcttgctaaaagatctgaccgctcaactgatggacgcctgaagcgaaaaacggctgagtggttctataagctccacaataaaataagcaatcctaaaattgaagagaatgttggtgatttcaggctgatgagccgtgatgttgtcgaaaatattaaacttatgccagaacgaaaccttttcatgaaaggtattctgagctgggtaggaggaaagacagatattgttgaatacgtgcgagcggaaagaattgctggagatacaaaatttaatggatggaaactttggaatttagcacttgagggtattacaagcttttccacattccctcttcgcatctggacatacatagggttagtggtagccagtgtagcatttatttatggggcgtggatgattttagatactatcatatttggaaatgctgttaggggatatccttcactacttgtttcaatactgtttttaggtggaattcagatgattggaataggagtattaggtgaatatattggacgcacatacattgaaaccaaaaaacgcccgaaatacatcatcaagagagtcaaaaaatgaataaagcaataaaagtatcattgtatatatcttttgttttgattatttgcgccttatctaaaaacataatgatgttaaatacatctgatttcggaagagccattaagccattaattgaagacataccagcatttacatatgacttacctttattgtataaattgaaaggtcatattgattcaattgatagctatgagtatataagttcatatagttatattttgtatacatacgtcctgtttattagcatttttactgaatatcttgatgctagggtgttatcgttatttctaaaagtaatatatatttattcattatatgcgatatttacttcatatataaaaacagaaaggtatgtaactttatttacattctttattttagcttttcttatgtgttcttcatcaacactgtcaatgtttgcatcattctatcaagagcaaatagttataattttccttccatttttggtgtattcattaacatgcaaaaacaataaatctatgcttttgctatttttttcgttgctaataatatctactgctaaaaatcaatttatattaaccccactaatagtgtattcatattatattttttttgatagacacaaactaattattaaatctgtaatatgcgtggtgtgcttgcttgcgtcaatatttgcaatatcttattcaaaaggtgttgttgaattaaataagtaccatgcaacatacttcggtagttatctttatatgaaaaacaacgggtataaaatgccatcgtatgttgatgataagtgtgttgggttagatgcctggggtaataaattcgacatatcatttggcgcaaccccaacagaagttggaacggaatgtttcgaatctcataaagatgaaacgttttcgaatgcactctttttattggttagcaaaccaagcaccatcttcaaacttccatttgatgatggtgtgatgtctcagtataaagaaaattatttccatgtatataaaaaactacacgtaatatatggagaatcaaacatactaacgactattactaacataaaagacaatatatttaaaaacattagatttatatcattgttattattttttattgcttctatttttattagaaataataaaataaaggcatctttatttgtagtatctctttttggaatatctcaattttatgtgtcatttttcggggaaggatatagagatttaagcaagcatttatttggaatgtatttttcgttcgacctttgcttatacataacagtcgtttttttaatttataaaataattcaaagaaatcaagacaatagcgatgtaaagcactaagtttaaattgcgcgccaatcatggcgcgcacaagctataataccaacctaatttctcctcctcttagagtgactatatctcctgatagaattgcggtattgactatcaaatgccctgattcgttgtttattgtaatatctcctctatctgcagacgataacttaaatgcatcattgcccacaacaaaccccctccagaaccaagtgctgatattatcatcaacagtgatagatacatatactaactgattatcgttataagtgattcctgtcttatacttaacataaggacttccactttgattctcgatagacacataacatccaggggttatgtttgtatgcgtcccgcgactatcgccccattaacgccatacgataaatgggatggtgagaaatgggtgacggataccgaggcacagcatagcgtcgcagtagatgcagcagaagcacagcgccagtcgctgattgatactgcaatggcttccattagtctgattcaactgaaattacaggctgggcggaagctgatgcaggcagagacctcccgacttaacactgtgctggattacattgacgcggtgacggcaacagataccagcaccgcgccggatgtcatctggcctgaactgccggaggagtaggccattcaatatctggcgcactggaagtatcgaccagctccagtgcgtccagataatccagccacaaattatattgcgccagttcctcacctttcagacgaccaatagccgctttaccagcccattgtttactgttcatataatcgttggcctgattaatcaattgctgctttttcagttcggctgcagcaatctgttcctcatgtgttggtggtggaatttcagaccatgcaggaaaaccattttctccagcgatacggatttttcctttcggcggtaatccggaaaactcaatatacacttgctcatcaacttcaacagcatcatctggccatgagccagcttgcgtgtaatcctctttcatctccaagggatagaaagagtttgtagtcgcggaatatatgtaattcatttttcactccataaagttaaaagaaattaacaccctaatgcgaaaaatgaagcaccgataccgggtacgcctgctctggaaataaatttcaccgggtcctggttataaccggcacaagctatatagccaacatttgcactgccgggagtgtaatcctgagtcgcaaatacccgcagacatctattcggaaatgcaatcggaaaataggttactgtgtcctgagacgtcagcggaacatcaattggcccccattgaataattaaaccggatggcaatttttgatatccaggaactgaagcagaaagcataaaactacccatatcaggtatctgattcgcccctgtccctacatttcttttagccgcttctcccaaaccaaggttttcgagagccttttgcaccgtgccgtccaatttgatatcgccaaacggattcttgcggcttaacagcagcgcacgaagcgcggtaagcagctggtcatgccgccccttctccaggctggcaccggaggcctccacaacgctgcaaagctcctcctgcaacatgtcaaagtagtcatcatccagatcggtggcaggcgtgccggtctgggggttaccacgggtacgggggattaccaaaggcagcacctttaagctccgcaagacgttctgaccagtcatgcgccagcgcgttgtcttccgcagtgtaatacgcggcacatttggcgttatcaccatcagtaaacagatccagaacaaacgggccaaacagggtgttaattccccagaaaatgttgtccggcgtgcgccactgatcgcccacttccttcagttcatgggctggtttgttccgcagctccaccagcgcctggcaatatttattactcattaagcccccacgtaattccctgagagataccactcttcacctgatgcagcccgcttactgcttttccgtaaacaccgttcacgacgcgccagaaaattgtttcgttctggctgggagtggctttcacggaatgccgccatccacaccgttgcagcacgacggtataagcccctggactccagttcttccgcctggcgggtcaggcacaaaatcacccgcgggtcgttagtgccgacatagaaattgcgcacaggtctggtttcacgaactggttgtggttccggatcctgcgctctctcagtcaggcgcgggaaatgtctgtgtgtatctccttcacaacggtgagccacacgcccactctgacgtaacttgcttgctgactgcagaacgcgctgccgtgagtaacctgcaaaagcatccgcaatgtctccggaagtacagcccggatgggcttcaatgaatttctgaacgtcattcaaaagactcatgctcaccccctgaatcctgccgggatctggctgtagtccacattgtcgtaactggctttgaagtacgggtcttcgcgtttttctgtgtacgtgctgacggacggcgataagcgcagggaaagctcatcccatttttcccgcagcttcgacgggctgagcacgttacggcaccagaacggatcgcggctgacgcggctgtacatctcgcagatttgtttgtgagtacgaccatcctgcacacacatcaggcgaatttcgtttgcccaggctgtccagttcggttctttgggacgaaccacctcgccgtcacattcggcggcctgctcgtacagggcgatgatttttttccagagccactgtgcgcaggtcaaatcatcctgcgttccccactggcgctttttagggctgaatacaaccgcatcaggatggcgagttaaaaaatcctgttcatccgtctgcgtgtccggttgcgaagcgtccggacgagaaggttttttatctgacggatcatgttttgattttactgacggatccccgccagattctgacgggtgaaaacccgattttttgccagatttcgacgcatcaaattttgacgggtcagattttgatgcgtcagattttgacgggtcagagtctgacagttgagaaaatgccgctgcctgaagcttcgcaacgttaagctgataaacattcgacgcattgcggttatgatgaggagcagcaaaatggctagcgaacgcagtactgatgtgcaggcatttatcggggagctggacggcggcgtatttgaaaccaaaatcggcgcagttctcagtgaagtcgcttccggtgtgatgaacacgaaaaccaaaggtaaggtctcactcaacctggaaatcgaaccatttgatgagaaccgtctgaaaatcaaacacaaactctcatatgttcgcccgactaaccgtgggaaaatttccgaagaagacaccaccgaaacgccgatgtatgtcaatcgcggtggtcgcctgactattctgcaggaagaccagggacaattactgactcttgccggtgagcctgacggaaaactccgcgcagcaggtcattaatatcattcttaattaactaattatttatctcatcactgaatatcttaatatagtgaggacttattatgtctcagaacttagacgcaaccgcaattaatcaaatccatgcccttatttctgctcagggtgttaatgaaattatcagtaagattggtgccgatgctgtggcattgcctgagaatttccgcattcatgatctggaaaaatttaatttaaatcgcttccgtttccgtggtgcgctttccactgccagcatcgatgactttacccgttattctaaagatcttgcagatgaaggcacccgctgctttatcgatgctgataatatgcgtgccgtcagtgtgcttaacctgggtactattgatgaaccaggtcacgcagataacaccgccactctcaaactgaaaaagacagcaccgttctctgccctgttgtctgttaacggcgagcgtaactcccagaaatcactggcagaatggattgaagactgggccgactaccttgtgggctttgatgctaatggtgacgccattcaggcaacaaaagcggctgcggcaatccgtaaaatcacgattgaagcaaaccagaccgctgattttgaagataatgacttcagcggcaaacgctccctgatggaatctgtcgaagcgaagaccaaagacattatgccagtggcatttgaatttaaatgcgttccgtttgaaggtctgaaagaacgtccgtttaaattacgcctcagcattatcactggcgatcgtcctgtactggttctgcgcattattcagctggaagcggtgcaggaagatatggctaacgaatttcgtgatctgcttgttgagaaattcaaagacagcaaagtagaaacctttattggtactttcaccgcctgatttcattactgcaaatgcccctgcgggggcatttatggaaacgtaattaactcaataatcaccggatggtgagggcttccttttacccaaactcagcgcggtgcagcgcatatacgtggagaacaaaatgtcatttattaaaactttttccgggaagcatttttattatgacaagataaataaagacgacatcgtgattaacgatatcgcggtttccctttcaaatatctgccgctttgccggtcatctttctcacttctacagtgtcgcccaacatgcggtgctttgcagccagctggtgccgcaggaatttgcttttgaagcattaatgcatgatgcaacagaagcgtattgccaggacatccccgcaccactgaaacgccttcttcctgactataaacggatggaagaaaaaatagatgcagtaatccgtgagaaatacgggttacctcctgttatgagcacgccagtgaaatatgccgatctcattatgctggcaaccgaacgccgtgatctcgggcttgatgatggctctttctggcctgtactggaaggcatcccggcaacagagatgttcaacgtgattccactggcaccgggtcatgcctacgggatgtttatggaacgttttaacgatttatcggagttacgcaaatgcgcatgaatgttttcgaaatggaagggtttcttcgcgggaaatgtgtaccgcgagatctgaaagtgaacgaaacaaatgctgagtacctggtacgtaaattcgacgcgcttgaagctaaatgtgcggcactggaaaacaaaataataccagtgtcagctgaactgccaccagcaaatgaaagtgttctgttatttgatgctaacggagaaggctggctgattggctggcgttctctctggtacacctggggacaaaaagaaaccggagaatggcagtggacatttcaggttggggaccttgaaaacgtcaatatcactcactgggcagtaatgccaaaagcaccggaggctggagcataatgaccacatttaccaataaagaactgattaaagaaatcaaagaacgaatcagcagcctagaggttcgagacgatattgagcgccgtgcttatgaaatcgcactcgtatctctggaagtagagccagatgaacgcgaagcctatgaattattcatggaaaagcgtttcggtgacttagtagatcgtcggagagcaaaaaacggcgataacgaatacatggcatgggatatgactctcggttggatcatctggcagcaacgagctggtatccatttttcaacaatgtcacaacaagaggtgaaataatagagccatacagcctcacactcgatgaggcctgtcagtttcttaaaatatcctgatctaccatcgccgtcatagagcgtatttttattacctgatttgcaggttcgattccctattcggagatagcactcatgcaacacgaactacagcctgattcactggttgatttgaaattcatcatggctgatactggctttggtaaaaccttcatctatgaccggattaagtcaggcgacctgccaaaagccaaagttatccacgggcgagcaagatggttatatcgtgaccattgtgaattcaaaaataagctcttaagccgcgccaatgggtaaaatagcgggtaaaatatttctcacatctaaaaaacaccattccaatcaatcccctgctgcttcaagtagatgtctgcaggggacaccatccttgtgtttatccctaaaaccacataaaaaccgtaaattaaattcgaactagcaggccgaataaggcacaccaggaactcgtggttttattcattatgaagtggtttttacctgttctcttagccagataataaacgcttcaatttttggccactgcctgcccggtaatgtggtgatgtaataatgctgatggcatttcaccgtcatatcgccaaacggcgcgacgagctcaccactggcaagccttttttgtaccaggcgttttcttcccatcgccaccccaatatgattcatcgcggcaataacagctaaatcagaacgatcaaagccaattccagaagatgtcggcaaattaaccgcataatgttgcgcccaactatgccattcatccgtaccggagtcgttgctccatgcctgtctgtcatggagcaacgtacagtgacacaggttaattaccgtgttggttaaagcatgtctttgagcgtattccgggctacatactggcaggatttcttcatccatcagaaagtgatgagtgagttgcgctgacggcgcatcatcaaagtagatcgccaaatcgattccggcacgttgcagattgacgttgtcattaccagtgagcacggtgagcgaaatagacggataccggcgtgtaaagtcacctaatgcgggcaccaaccagcattgggcgatagagggccgggaatacagagttaacgttcccgataactcctgatttttgatatcaagaatttcctggttcagggtatccagcgacgattttagcgcccaataaacacgtttcccctcgtgcgttaattccactttgcgatgggaacgaacaaacaactgaatgcccaattcttcttccagctgattgatacggtgacttaccgcactggggctcagcgacaattcctctgccgccagggcgaaggactgatgcctggcagccacttcaaaagtatgcatttttgataattgccagccgttaagcagccgatttcttatttcacgaaggggttccataatcacctcatttttcgcttaagtgtaaaaaaatagcggcaaaatttcagctatgagatgagctaaagtgaaccatatctcaattcaccttcatttttagatgtaaatcactccattgatgcaatttacctcatgtgaaaggcaaattttatcgtttgtcagcctgcgttgtttttttgtccaatatcatcaggttaatcacaggggaaggtgagatatgcactctcaaatctgggttgtgagcacgctgcttatcagcatcgtgttaattgtactgaccatcgtgaagttcaaattccacccgtttctggcgctgttgctggccagcttcttcgtgggaacgatgatgggcatggggccactggatatggtaaatgctattgaaagtggaattggcggaacgctggggttcctcgcagcggttatcggccttggcacgatactgggaaaaatgatggaagtatccggggccgcagaaagaattggtctgacacttcaacgctgccgctggctttcagttgatgtcattatggtgctggttggcctgatttgtggcatcacgctgtttgttgaagtgggcgtcgtgctattgattcctctggctttttcaattgccaaaaaaaccaatacctcattattaaagcttgccattccgctatgtaccgcattgatggcagtgcactgcgtggttcctccacatccggctgctttatatgttgccaataagctgggcgcagatatcggttcggtgatcgtctacggtttgctggttgggctgatggcatcactgatcggtggcccacttttccttaaatttctgggtcaacgactgccctttaaacctgtacccacagagtttgcagatctcaaagttcgcgatgaaaaaacactaccgtcattaggcgcaacgttattcaccatactgctacccattgcgctgatgttggttaaaacgattgccgaattgaatatggcgcgtgagagtggtttgtatatcttggttgagtttattggcaaccctatcactgccatgtttatcgccgtgtttgtcgcctattatgtgttgggtatacgccagcatatgagcatggggacgatgctcacacatacggaaaatggcttcggttctattgctaatattttgctgattatcggggccggaggcgcattcaacgccattttaaaaagcagcagtctcgctgatacgctggcagttattctctccaatatgcatatgcacccgattcttctggcctggttagtggctcttattctgcatgcggcagtgggctccgctaccgtggcaatgatgggggcaacggcaattgttgcacccatgctgccgctgtatcccgacatcagcccggaaattattgcgattgctatcggttcaggtgcaattggctgcactatcgttacggactcgcttttctggctagtgaagcaatattgcggcgctacgctcaatgaaacatttaaatactatacgacagcgacatttatcgcttcagtcgtcgctctggcgggcacattcctgctgtcatttatcatctaagcgcaaagagacgtactatggaaaacgctaaaatgaactcgctcatcgcccagtatccgttggtaaaggatctggttgctcttaaagaaaccacctggtttaatcctggcacgacctcattggctgaaggtttaccttatgttggcctgaccgaacaggatgttcaggacgcccatgcgcgcttatcccgttttgcaccctatctggcaaaagcatttcctgaaactgctgccactggggggattattgaatcagaactggttgccattccagctatgcaaaaacggctggaaaaagaatatcagcaaccgatcagcgggcaactgttactgaaaaaagatagccatttgcccatttccggctccataaaagcacgcggcgggatttatgaagtcctggcacacgcagaaaaactggctctggaagcggggttgctgacgcttgatgatgactacagcaaactgctttctccggagtttaaacagttctttagccaatacagcattgctgtgggctcaaccggaaatctggggttatcaatcggcattatgagcgcccgcattggctttaaggtgacagttcatatgtctgctgatgcccgggcatggaaaaaagcgaaactgcgcagccatggcgttacggtcgtggaatatgagcaagattatggtgttgccgtcgaggaaggacgtaaagcagcgcagtctgacccgaactgtttctttattgatgacgaaaattcccgcacgttgttccttgggtattccgtcgctggccagcgtcttaaagcgcaatttgcccagcaaggccgtatcgtcgatgctgataaccctctgtttgtctatctgccgtgtggtgttggcggtggtcctggtggcgtcgcattcgggcttaaactggcgtttggcgatcatgttcactgcttttttgccgaaccaacgcactccccttgtatgttgttaggcgtccatacaggattacacgatcagatttctgttcaggatattggtatcgacaaccttaccgcagcggatggccttgcagttggtcgcgcatcaggctttgtcgggcgggcaatggagcgtctgctggatggcttctatacccttagcgatcaaaccatgtatgacatgcttggctggctggcgcaggaagaaggtattcgtcttgaaccttcggcactggcgggtatggccggacctcagcgcgtgtgtgcatcagtaagttaccaacagatgcacggtttcagcgcagaacaactgcgtaataccactcatctggtgtgggcgacgggaggtggaatggtgccggaagaagagatgaatcaatatctggcaaaaggccgttaataacgtttcaacgcagcatcgcaatcctttccctgggtgagcgatgctgccgatggcgcagacttaagatccccggtcttacccgctataaccccctccttttatcatcacccaacgcctttcgctgtaaacggcggtttcgcaaaccaaaccaaaaccgtaagtaagataaaagcaatagccgccatacggaaaatctcatttgcagaaatagaaagtgactgctgggttatttcattattaatttcattaagaactcctgaaagcgaaccataatatttatccataatttgtgacgatgaattaaacacggggttaaattgatcgatggttgctgtcaactgactatggtgtaacgattcgcgtcgtccccacagcgtcattgtcaacgacgtaccaactgatcctgacaaggtacgaaaaaaattactcatactcgaggcattggcaaatttattatctggcaagcctgaaaacgaaatcgttgttaagggtaaaaagaaacaggcaacggcgaatccctgaaaaaactgcggcaaaatgatgcctgtaaaatcaatcgttggcataaatgtcacagaacgccagtaatagcaaaccgcatacatcaaaaaactaaatgtcactaacaaccgcatgtctattttgttgccataacgtcctatcaaaggtgaaattaatagtggcatgatgccgatgggcgcataagcaagtccggcccatatcgcattataccccatcgtttcctggagtaactgcggcataaggacgatcgctccagagtaaaataaatacgcgcatgtgatactcacaataccaatggtgaagttacgggacttaaacaaactgagatcaagaatcgggttctctgaggtcgactcccaaatgactaaagagatcagagaaataactgatactactgttaatattattattgtactcgagttgaaccaatccagatcgcgccctttatcaagcataatttgcaagccaccaacaccgagcactaacagggtcagtcctggtagattcattttgaccggtgaagtctcagtttctcttcctttaagtaaggttaagcataatgtcaggacgataatccccatagggacattgattaaaaatatccaaccccagctaaagttatcacaaatataaccgcccaatatcggcccacatatcggagcgataatcacggtcattgaccataatgccagagcaaatgttcttttttctggcggataattccttaataataaactctgtgacagtggaattaacggccccgccattaacccctgaacgactctaaaaaatatcagcacatcaagattggtcgataggctacacattaatgaagacagcgaaaaaaaagtgactgaaagtaaaaataatcttaattcgcctattctttgtgccaacctgccagtaacagggatcgcaatggcatttgctacaccaaacgaggtgataacccaggtgccttcgtctgttgatgctcccagaaagccagatattgtcggtattgcgacgttagaaatagtggaatccaacatttgcataaatgtcgctaatgacaatgcaatagtgacgcaccataacgtcccaccggttaatggtgccggagttgatttagtgattgccattaaagttgtccattatgcgaaataatgttgctaatttctttttctatcggactggtatcgataactaaagccttactggtataagccggcatggaggtcacggttgaagccagctcaggcatctcggcaatgtcttcgttcttcgtatcaatagttgctgtcatcgataaaccaatacgcaaggggtgttccatgagttcttttggatcaagagaaacttcaaccggtacacgctgaacgattttgatccagttccctgtcgcattttgtgcaggtaataaggagaacgcattgccggttcccatattgatccctgtcacccgaccatgaaacacaacattttcaccataaagatcgctgataatattgaccgattgaccaatccgtacatccgtgagttgtgtttctttaaagttggcattaacccacatttgacgtgccggtacgacagccattaacgattgtccggggctcactgtttcgccgacctgaacacttctctgggcaatatagccggtaaccggactcttaatatccgtacgtttaagcgccaaccaggcttctttagttgcatccgccgcttcaacgacttgtggctgacggtttaatggtgtgttcattactaaagctttattcgctttataagcctggatagcggcattcaatgccgctttgctacttattaacgtatctttggtatgctccagcgtttcttttgaaataaccccctgcttcgctaacggcactcgacggttataatcttctaaagattgttgatactgaatacgtgctgaagcgacttcggcactgtattgtttatcctgtaagtatagtttattcgtttgccgaacaatatttgccagattatttttagctttattgagtgcgatagtggcatcagttttatccagtgaaactaaaatgtcaccttgtcgaacgtagttcgtatctttatgattaacgacagtgacactacctgagacttgtgcagaaattggatctgcattccccgtgacataggcgtcatctgtactaatcatgtcttctaattccattgaccaataggcataggcacctgaaaacgcaataaataaaactaccgccaataaagaaaagtattttcttctgttagaatgttttttatttgaattaatctgttccactattatctctcatttctcatagatgaaatttatgaattgaatgaaaagagcattcattcttcatatcaaacacagtgcatgtgttgcacattatcccaggaacgttggaggcctaatttaaatgaggtgcaaaaaaaacaacagaggactaaaccgtggcttttgcaatacaattcttacgcctgtaggattagtaagaagacttatagtgccaacttgaaactataaatcatcggtacaatccctgattttattgttgacatttcatttatgccgactatttatatggtatacttgtcgaattatcttaaaggaagctcagattttcttatttttattgagaaaatgagatgacgccttatgtctgtattactacagggagaagggagatgcttcattgcaaagggaataatctatgaacgcaataattattgatgaccatcctcttgctatcgcagcaattcgtaatttattgatcaaaaacgatattgaaatcttagcagagttgactgaaggcggaagtgccgttcagcgggtggaaacacttaagcctgatatcgtcatcattgatgtcgatatccccggagttaacggtatccaggtgttagaaacgctgaggaagcgccaatatagcggaattattattatcgtctccgctaaaaatgaccatttttacgggaaacattgtgctgatgctggcgctaatggtttcgtgagtaaaaaagaaggcatgaacaatatcattgcggctattgaagctgcaaaaaatggctactgctatttccccttctctctcaaccggtttgttggaagtttaacgtccgaccagcaaaaactcgactccttatcgaaacaagaaattagtgtcatgcggtatattcttgatggcaaggataataatgacattgctgaaaaaatgttcatcagcaacaaaactgtcagcacttataaaagtcgcctgatggaaaaattagaatgtaaatcactgatggatctttacacattcgcacaacgtaacaaaatcggctaaccacatgaagtttttaccctatatttttcttctctgttgtggtctttggtcgaccataagtttcgcagacgaagattacatcgaatatcgtggcatcagtagtaacaaccgtgtcacacttgatccactacgtctgagcaacaaggaattacgttggttagcgagcaaaaaaaatcttgtgattgcagtacataagtcccaaacggctacgttgttgcataccgattcgcagcaacgggttcgtggtattaatgctgattatttaaatcttttaaaaagagcgttaaatatcaaattaacactccgggaatacgcagatcatcaaaaagcaatggacgcgcttgcagaaggtgaagtcgatatagtgttatcacatttagttacttcgccgcctcttaataatgacattgctgcaaccaaaccattgataattacctttccggcgctggtaaccacccttcacgactcaatgcgaccgcttacctcaccaaaaccagtaaatattgctcgggtagcaaattaccccccagacgaggtaattcatcaatcatttccaaaagcaacaattatctcttttacaaatttatatcaggcattagcatccgtctcagctgggcacaatgattactttattggtagtaacatcattaccagcagtatgatttcccgctatttcactcactccttaaatgtagtgaaatattataactcgccgcgtcaatataattttttcttgaccagaaaagaatctgtcattcttaatgaagtactcaatagatttgttgatgctttaacaaatgaagttcgctatgaagtatcacaaaattggcttgatacaggaaacctggcctttctgaacaaaccattagaactcactgaacatgaaaaacagtggattaagcagcatcccaatttaaaggtgctggaaaatccttactcgcccccctattctatgacggatgaaaatggctcggttcggggcgttatgggggacattcttaatattattaccttgcaaacaggtttaaatttttctccgatcaccgtttcacacaatatccatgctggaacacagcttagccccggaggatgggatataatacctggcgctatttatagtgaagatcgagaaaataatgttttatttgctgaagccttcataacaacgccttacgtttttgtcatgcaaaaagcgcctgacagtgaacaaacattaaaaaaaggaatgaaagttgccattccatattattatgagctgcattcgcaattaaaagagatgtatccggaggttgaatggatacaggtcgataatgccagcgctgcatttcacaaggttaaggaaggtgaacttgatgctctggtcgcgacacagctaaattcgcgttacatgatcgatcattactatcctaatgaactttatcattttcttattcctggcgttccgaatgcatcgctttcgttcgcttttcctcgcggagaaccggaacttaaggatattattaataaagcactgaatgcaattcccccaagcgaagttctgcgcctgacggaaaaatggattaaaatgcccaatgtgaccattgacacatgggacctatatagcgagcaattttatattgttacgacattatccgttttattagttggcagtagccttttatggggattctacctgttacgctcagttcgtcgtcgtaaagtcattcagggtgatttagaaaaccaaatatcattccgaaaagcactctcggattccttaccgaatccaacttatgttgtaaactggcaaggtaatgtcattagtcataatagtgcttttgaacattatttcactgcggattactacaaaaatgcaatgttaccattagaaaacagtgactcaccctttaaagatgttttttctaatgcgcatgaagtcacagcagaaacgaaagaaaatcgaacaatatacacacaggtatttgaaattgataatggcatcgagaaaagatgcattaatcactggcatacattatgcaatcttcctgcaagtgacaatgcagtatatatttgtggttggcaagatattactgaaacgcgtgatctaattaatgcactcgaggtagaaaaaaataaagcgataaaggctaccgtagcaaaaagtcagtttctggcaacgatgagtcacgaaataagaacaccaataagctctattatgggcttcctggaacttctgtcgggttctggtcttagcaaggagcaacgggtggaggcgatttcacttgcctacgccaccggacaatcactcctcggcttaattggtgaaatccttgatgtcgacaaaattgaatcgggtaactatcaacttcaaccacaatgggtcgatatccctactttagtccagaacacttgtcactctttcggtgcgattgctgcaagcaaatcgatcgcattaagttgcagcagtacgtttcctgaacattacctggttaagatcgaccctcaggcgtttaagcaggtcttatcaaatttactgagtaatgctctcaaatttaccaccgagggggcagtaaaaattacgacctccctgggtcacattgatgacaaccacgctgttatcaaaatgacgattatggattctggaagtggattatcgcaggaagaacaacaacaactgtttaaacgctacagccaaacaagtgcaggtcgtcagcaaacaggttctggtttaggcttaatgatctgcaaagaattaattaaaaatatgcagggcgatttgtcattagaaagtcatccaggcataggaacaacatttacgatcacaatcccggtagaaattagccagcaagtggcgactgtcgaggcaaaagcagaacaacccatcacactacctgaaaagttgagcatattaatcgcggatgatcatccgaccaacaggctattactcaaacgccagctaaatctattaggatatgatgttgatgaagccactgatggtgtgcaagcgctacacaaagtcagtatgcaacattatgatctgcttattactgacgttaatatgccgaatatggatggttttgagttgactcgcaaactccgtgagcaaaattcttccttacccatctgggggcttacagccaacgcacaggctaacgaacgtgaaaaagggttaagttgcggcatgaacttatgtttgttcaaaccgttgaccctggatgtactgaaaacacatttaagtcagttacaccaagttgcgcatattgcacctcagtatcgccaccttgatatcgaagccctgaaaaataatacggcgaacgatctacaactgatgcaggagattctcatgactttccagcatgaaacgcataaagatctacccgctgcgtttcaagcactagaagctggcgataacagaactttccatcagtgtattcatcgcatccacggtgcggctaacatcctgaatttgcaaaagttgattaatattagccatcagttagaaataacacctgtttcagatgacagtaagcctgaaattcttcagttgctgaactctgtaaaagaacacattgcagagctggaccaggagattgctgttttctgtcagaaaaatgactaaatagcggctcccacaatgttcaaatgtgggagctatttaccagcacatcttacatttatgatgagaactcctggcgaatttgttccccatgctggtcgagcgttgccgctcccggcataacatgcgggtccgcgcagccgctgatttttatcggattacccggcatcattattcccccggcttcaatcaacatatttctcgcctgagtttgtggcaatttaatggcctcagccacacttaataacggcgcgacgggtacaccaacttcatgtattctggctaaccaaacttcagctgcctgcgtttttaacgtccgctcaatatattgtttaagaatagcctggttttgtacgcgtaaaatattgctgctaaatcggggatcattaaccagttccgtaagctccagtgcctggcataacgcagaaaaaagcttgtcattaccacaacaaatcgtaatcggcttatcctgagtattgaaaacatcaaaaggtgccatgtagggatggcgatttcccagacgttgtggtgacttcccagttgcgatatatgccatcagaccatgctccagaaaactcagcgtggcatcaaacatcgctatatcgacatgcgcccctctctggctcttttcgcggccataaagtgcactcactattccgctgaataaatagacaccgccgcatagatccgcaagagatgtaccaacgcgcactggcggagcatcaggatatcctgtttccatcattatcccgctcattgcctgaatgatggtatcgtaggcaggagcatcttttagcggaccggtatgtccgaaacctgacgatgaagcatatatgaggcgcgggttgatttcttgaagcgtttcccatgaaaaccccagtttttccattgtacctgggcgaaaattctcagctaatacatcagcttgtttgagcatatttataaatatacttttatcgtgatcattctttaaatcaagaaccacactctctttgccatgattaataaaactgtaatagagtgactgtccatccacatagggaccaaatgtgcgggtatcatcaccatgacccggcggctcaactttaattacccttgcgcccatattacaaagaagttgagttccgaaaggtccattaaggacatgtgtcatatcgataactaataagccttcaaacggccctttgctttcattatttgtcatttgcttatgccttgaaaaaagccgaaggtgaaaagacacttcggcatttatgtaaaatcaataacatgattaattatgaaaccagtcgactgacataaatccacaagggagccgtgacgacaaagcccagtacgctcacagccaatgacgctgtaccagtacgggtgtagacattaaaccggctggcaataatgattccggagaatgccggcggtaatgcgcctgccagtaccatcatctgcagatgttcgctgttcaaatgacatgccataccaacgagaagcagtgccagtggcatcagaatcagcttcaggaaggtgttataagcaatttcggcactgaactcgaatttatgtgcagccagagtcaaccccgcagcgaataccgctacccctgagttagccttcgcaatcagattaaaggttgggtcccatgctgccggaatttttaccccaaccaacaccaggatcgttgccagaacaggtgcccatactactggctcctttgccgcagaaattaatgcgctcagattactattcttcttaccatccgctcctgaagaaggattcagcaaatacagaccaataggaatagtaattgcgttaacaataatagaaataattgctaccactaaacctgttgatacggaatcaccataaataggatcgagaactgcaaaccccaggaatccaatggtaggtgaacctgcaattaatgcacatacagctgcttctgcatgggtacgtttaaaaaatttgtagcaaccgaaccaggagaaaaagaaacatccgacaataaccacaagtgatacaagggtcagacgagtgtccgcaaaaatcatttccctgtttgcccgagtaatagatacaaatagagccgcaggaagcgcgtagtttaataccagtttattaaatgcccgagcttgatcttctgaaaatgtttctcgtctgccgctaaaataacccaacagcatgattacgataataggcaataaatcgccaataaaaaatgttagcataatagtatttccgataagggtcccctcaccatcgcataatgagttggcaagaggagacgatgtcagtatttaattaccagcgacttgttttgggttaagtttggtaatatggccactttcagttcctgctgcagggtcgatgaccacattaataatggtcggtttgcgcgactgaataccggtggttaaagcatgacgaagttcatctgtcgtggtgacgttatagccaacgccacgaaacgcatccattaatttgtcataccttgcatggtgcaacagatccgttggtgatggtgcaccagcgccactgagatcaacaccgtctcctctgtagatgccgccattattaaaaataacgatcgtcaccggcaggttatatcgacaaatcgtttcaatttccatcccactgaaaccaaaagcactatcaccttcaatggcgacaaccggagaaccagaagtcacgctagcaccgatggcatagcccataccgatgcccatgacaccccaggtaccacaatccagacgacgacgtggtttatacatatcaataatatttcgtgcattatccagggtatttgcaccttcattaactaaataaatatcctggttctcgcgcaatacgtcgcgcacagcacttaatgcattaaagtaatttaatggttgagtatctgtacttaatttttcatgcattttttgtgcattttgctgcttgtggatatttaaaatatcgcgccataccagtggagtcgtaaatgtgttttgtttcagttctgccagcataccttgcatactggatgcaatatcaccaacgactggcacagcaatggggcggttgctgtcaatttcctgcggttcaatatccagttgaataaactgtgtatctgccgcccatccttttttaccgtgtgccaataaccaattcagtcgtgcaccaacaagcatgacaacgtcagcatttgccagggcaaacgaacgcgcagctgccgcagaaagtggatgcgtatcttcaaggatccctttcgccatagacattggcaggaatggaatctgagcactttcaataaattcacgaagctgttcatcagcttgtgaatacgccgcgcctttgccaaggataattaatggccgttcagcttttgctaaaagcgaaattgcgctagtgactgacttcgggcatggcaataatgctggcgacggattttcaactttaacaatcgtggttaacgcttcgtctttttccatcgtcgcggccaggacatttgctggcaaatcaagataaactccgccagggcgacccgatacagagacccggatagcgcgtgccaatgcaatgccaagatcctgcggctgattaacgcgaaatgctgctttggcatacggttttgccgcattcatttggtccagctcttcataatcaccttgctgtaggtcgacgatcgcgcggtcgctggagccgctaatcatgatcatcggaaaaccatttaccgttgcgttggccaatgcggtcaaaccattgaggaatcctggcgcagaaactgtcaggcagatccccggtttttgggtaagaaaaccgcttgccgcagcggcatagcctgccgactgctcatgacgaaaaccaatataacgaatgccttccgcctgggcatggcgtgccatatccgtcacaggaatacctacaacaccataaatagtgtcaatattattctgttttaatgcttcaacgatgatatgcataccatctgtcatttgaagttgatctgacatgattaataacctcgaaatttttataaattgggagccagaagcccccgttaatatcagatggcgtggttttgcttcattgcagcaatttcatcgtcgctataacccagctcctgcaatacagcagcggtatgttcacctaatagcggcgcagctttaatatccggcgtaaaggcagagaatttcattggacaaccaacggtcagatattttccacgcaacggttgttccacttcaacaacactgccactttggcgcaaagagggatcaagtgaaatttctttcatacttaaaaccggtgcacaaggaatatcaaactgagtcaaataggccaccgcttcatgtttatcaatagtgacagtgtatttttcgatttcagcaaaaatatcgaaaatatgtggctgtcgtgcatgggctgtactgtatgccggatcggtaatccattctggtttgccgatggctttacaggtgttttcccagttttgctcctgaatagtgaaataaatataggcgttaggatcggtttcccagcctttacatttcaggatccagccaggctgaccgccaccacctgcattaccaccgcggggaactgcatcaccaaatgtaccattcggatactgcgggtattcttccagataacccaatttatcgagacgctgctggtcacgtaatttcacgcggcaaaggttcaatacggcatcctgcattgacatggtgactcgttgcccacgccccgttttttcgcgatgcagcaaagcagcaagtaaaccgatcagcaaatgcattccggtgttgctgtcacccaacgctgcagcgcttaccagcggcggaccatcccaaaaacccgtagtggatgccgcgccacccgctgcctgagcaacgttttcataggcttttacattcacataaggcgaacactcatcaaaccctttgatcgaaccaaaaatcagacgtggattgatttcttgaatatgctcccaggtgaagcccatgtgatcaatggcccctggatgaaagttctcgactaagatatcagcttcgcggatcagcttttccattacctctttgccttccgctgttttggtatttaactcaatagaacgtttgttactgttaagcatggtgaagtaaagcgcatcgatatcaggaatatctcgcagctggtgacgcgttacgtcaccaacgccgggacgttcaattttaataacgtcagcgccaaaccaggccagcatttgagtacaagatgggccagattgcacaccggtgaaatcgagaactttaattccttgaagtggagttgacatagcaatacctattagttaattaaatatgtgttaatttagcgtttatttaaggcgtaatatcttctataaataacccgcaaaatatcgtcgtagctgcactcgatatttttaaaatcctgtatcaagtgctgaaaatcatttcatcgccacttccaattcctttctgcatggtaagtagtgaggacgaaaagaagaatatgataaatattgattcgtggtaatcagagagagtcgcgacatttgtgatgttattcttacaactgtaagaagcgccggtgatttacaagcaagggtatgattacgctttttaaagcgtaccataaaacataacataataaatgatttgtgatgacacgggattattgcggtttactttgaggaatataaaatgcgagtttatagcaccgcgagcgccaaataattttatgaccacaacctgtcgtattgtggtcataaaaaattgtcggctggagggagttaaatcctttacctcaatatactgcctgtcagcattagttcacaaacagtgcttcgctatcgacgatgattccatcttccgcacctttaagcgccaggtttgcctcgtagtattgctttttatcaagcagtttctgcgcatcagcaagtgcattacgagtctgtttaagtggcatcagatattggttttccattacgccaacaccggccaggcgaagctcttccattgcgccctttttatcccctttcgccattttttcattggcaatttttatcgcggcttctttttcgggagttgctacataactctcagaaattccgacagatgcattaatgacaatatattggtcatcattgagattggtctttttacctggcttagcgaactttgcccattcggtactgtcatctgacagcaaagcggaagcttcattggtcagttcttttgccttttctggatcgccatgaaacagagccaggcgcgctacctgcacgtcacgcatcgcatataaaccttgttcagagatacgctctgctgccgctgccgttttctgggtttgctgaacttgctgagtttgctgttgtgccgctaccggagcattatcagcagcccatacagttgaagatgccagaattgctgtgaccatcgtggccataattaaacgtttcatacttacctcattctttaacagttttagaaaacgccgccatcatattgggtgagcatgaaatgagaaatcagagagcaacggtcattttgaaagggttatcttacagttgtagttattatcgcaagaagtattttagtcttacaattgtaggaatatgcttcctgtcgcagagaactattcttatataccacaaagagatgtcatttattatatcgatgtaaatactgattaattaaatgtaaatacagccataacatcgtaggttctcagtgaaccattttcaggataactttctatgaaagtaaacttaatacttttcagcttatttttattggtctctattatggcatgcaatgtttttgcattttccatttcgggtggtggaagtgagaggagctataaagagactgaaaaaacatcagcgatgacgaccacacactctacaaaacttcagccatcacaggcgattttgtttaagatgagagaagatgcgccaccattaaacctcacagaagaaatgccgcccccttttccgacaaaggcgaattatcttattcatcctgtgcgatagcgtctttcacatggcaggtgaacaatcatgtctgatgctgatgtgaacacctgcccaaatgagccatcctgacccactaccgcctgccataccccaccataaagcgaatcatcaagccacaagccggggcaagaaacataaatatccccgtcactagttcattaccgccagttaaccacatggtgaagtaataaatgagtgcagcgaggatcaccatgccgaagaaagaagagaccgccgataccacgttcagtacctgaccgatgtagccgcttacgcagacaatacacagggcgagaaacatccataaattaatcatagctcaacctcctgccgcgctaaaaaacctgtaacttcagtcactttaatagtaagacaatccttaacctctggcaatttttgctaagcatcaatgaaaacagcatgttaaatgcaagactgttgtgtacggaaaaatatttactttgcacgattaataatcagtagctgaaagcagtcagcgagtgataaagtacagataccgcattcatgctcctcgtggttatgtcctgactagtctttacactctttacaggaaccattgtcgtacatgatggcccaaccaattgagtgtaccgctgtcgacatggaatcttctgcgatacaacaattcgtatctacagaaggtaactatgtttccacaatgcaaattttcccgcgagtttctacatcctcgctactggctcacatggtttgggcttggtgtactctggctttgggtacagcttccttatcctgttctctgctttctcggcacgcgtattggcgcaatggcgcgaccattcctgaaacgtcgtgaatctatcgcccgtaaaaacctggaactttgtttcccgcagcattctgcggaagaacgcgagaagatgattgccgaaaactttcgttcactcggcatggcgctggtagaaaccggcatggcatggttctggcccgacagtcgcgtacgtaaatggtttgatgttgaagggttggataaccttaaacgcgcacaaatgcaaaatcgcggcgtaatggttgtcggcgtccattttatgtcgctggaactgggcggccgcgtgatgggactgtgccaaccaatgatggctacctatcgtccacataataatcagctgatggaatgggtgcagacccgtgggcgcatgcgctctaacaaagcgatgatcggcagaaataatctgcgcggcattgtcggtgcactgaagaaaggtgaagcggtatggtttgctcccgatcaggattatggtcgtaaaggcagctccttcgcgccgttctttgcggtggaaaatgtcgccacaaccaatggcacctatgttctctcccgtctctctggcgcagccatgttgaccgtaacgatggtaagaaaagcggattacagcggatatcgtttgttcatcaccccagagatggaaggctacccgacagatgaaaatcaagccgctgcctatatgaacaagattatcgagaaagagatcatgcgcgcaccggagcagtacctctggatccaccgtcgctttaaaacgcgcccggtgggagaatcgtcgttgtacatttaacaaactgctcttactctttccctcctcaaatcggccataataacctcatggtttttatggcttttttcttaaggttttttccttcgctgaatatctaattattaccgtcagaaattaaactgtcgccgatatgagacacttgtaagttactaaaagtaaataagaaaatgcctcttgtctcgtttcagttttaggcgtacattagcgccgtctcgagcagtttagctcagaattctggggtgatgcccacggtaaaatacagggcttttaaggtcgctttgcccggtgtcaactcactgtatcaggtgtaatgaagtcattcaggcgtaacagtaattacgcggagagatgtaaagtgaaatatttctttatgggcatttcttttatggtcatcgtttgggccggtacttttgccctgatgatctaaaagcaaactgtgcaatgaaaaacaggagccatcaggctcctgtttgcatttctgacgacggtgtttattccgcgttttcgtgaatatgtttgctgctggcgggtagtaaaccgtcggcacggaacatcgctttaatccctctgatggcctgacgaatacggtcgcggttttcaatcagtgcaaagcgaacatgcgtatcaccatagtcgccaaagccaatccccggcgagacacaaaccttcgcttcgttaaggagcttcttggcaaattccagcgatcccatggccgcatatggttccgggattttcgcccagacatacatcgaagccttcggcatttcaaccatccagcccgcttcatgcagccctttaaccaatacatcacggcggcgtttgtactgttcggcaatgtcgcgcacgcactgttgatcgccctccagcgccgcaatcgccgccacctgcaacggcgtaaaggtgccgtaatcgtgatagcttttaatacgagccagggcgctgaccagcgttttgttgccaaccataaagccgatacgccagcccgccatgttgtagcttttcgacagcgtaaagaactcgactgccacatcgcgtgcacccggtacctgcataattgacggcgctttccagccatcgtagacgatatcggcataggccaggtcatggaccaccagcacatcgtagcgtttcgccagcgccactactttttcgaagaactccagttccacgcattgcgcggttgggtttgacgggaagccgaggatcatcatcttcggtttcggataactttcacgaatggctcgctccagttcgttgaagaaatcgacaccttccaccagcggcactgagcgtacctgcgccccggcaatcaccgcgccataaatatggatcgggtaacttggattcggcaccagcaccgtgtcaccatgatccagcgtcgccagcatcagatgcgccaggccctctttcgaaccaatagtgacgatggcttctgattccgggtcgatttcaacgtcgtagcgatcctgataccagcgggaaatggcgcgacgtaaccgcggaatgccgcgtgaagtggagtaaccatgcgtgtccgggcgctgggccacagtacataatttttcgacgatatgcggcggagtcgcaccgtccgggttacccatgctgaaatcgataatatcttcgccgcgccgacgcgcagccattttcagttcagcggtgatgttaaaaacgtagggcgggagacgatcaatgcgcgtaaagcgacgttcagggcgagtgtcagccataatttcctcagattaacgttagcgcccggaccgtccgagcgacgctgccacgatggtggctgttttgaaaatagcctgattaatttctgtctgtccagcgttttagaacattttattaatgacgttaaatgaggaactctgctttaaaaacaggaaatttatctgcgctaacaagaaaattaccactcattttattaacataataatttcaataaatttactaaccagaagtgcattatcaagagatgcattgctaatacaccatttatctatcaatccccttttaaaattgtggtttttcctcaaaaacggcctgctggtcatcagccttcaggttacctatcatagaggtttaatccttattcagagtcacccgtgcacgaaatattcaacatgctgctggcggtcttcgatcgggcagcgttaatgcttatctgcctgttctttctcatccgtatccgcctgtttcgcgaactgttgcacaagtcggcgcactccccaaaagaattgctcgccgttaccgccattttctcgctgttcgccctgttcagcacctggtccggcgttcccgtagaaggctcgctggtgaacgtacgtattatcgcggtgatgtccggcgggattctgtttggcccgtgggtaggcatcattaccggcgtgattgcgggtattcaccggtatttaattgatatcggcggcgtgacggcgatcccctgctttatcaccagcattctggcgggttgtatatcgggctggatcaacctgaaaatccccaaagcacagcgctggcgcgtcggtattctcggcggcatgttgtgtgagacgttgaccatgattctggtaattgtctgggcaccaactaccgcgttggggatcgatatcgtctctaaaatcggcattccaatgatcctcggtagcgtctgtatcggctttattgtgcttctggtgcaaagcgttgagggcgaaaaagaggccagcgccgcgcggcaggccaagctggcgctggatatcgccaacaaaacgctaccgctgtttcgccatgtcaatagcgagtcattacgcaaggtctgcgaaattatccgcgatgacattcacgccgatgcggtggcgattactaataccgatcatgtgctggcctatgttggcgtgggtgaacataactatcagaatggcgatgacttcattagcccgactacccgtcaggcgatgaattacggaaaaatcatcattaaaaacaatgatgaagcccaccgcacaccagagattcattccatgctggtgatcccattgtgggagaaaggggtcgtgaccggaacgctgaaaatttactactgccacgcgcatcagatcacctcgtcattacaggaaatggcggtcggtctgtcgcaaatcatctccacgcaactggaggtttcacgcgccgagcagctacgtgaaatggcaaataaggcagagcttcgcgccctgcaaagcaaaattaatccccattttctgtttaacgctctgaacgctatttcatcgtcaatccgtctgaatccggataccgctcgccagttgatctttaatctgtcgcgttatctgcgctataacattgaattaaaagacgatgagcaaatcgatatcaaaaaagagctgtatcaaattaaagactatattgccattgagcaggcccgctttggtgacaagctgacggttatctatgatattgatgaagaggtgaattgctgcattcccagcctgctgatccagccgttggtggagaacgccattgtccacggtattcagccttgcaaaggtaaaggcgttgtcaccatcagcgttgcagagtgcggaaatcgggtacgcattgcggtgcgagataccgggcacggcatcgatccaaaggtgattgagcgggtcgaagcgaatgaaatgccgggcaataaaattggcctgctgaatgtccatcatcgcgtgaagttattgtatggcgaggggctgcatatccgccgcctggagccggggacggaaattgcgttttacattcctaaccaacgcaccccagtcgcctcacaggctacgttattgctttgagccggagtgatattgtgaaagtcatcattgttgaagacgaattcctggcacaacaggaactgagctggctaattaaagagcacagccagatggagattgtcggcacctttgacgacggtctggacgtgttgaagtttttgcagcataaccgcgtcgacgccatttttctggatatcaatattccgtcgctggatggcgtgttgctggcgcaaaacatcagccagttcgcccataaaccgtttattgtgttcatcaccgcgtggaaagaacatgcggtagaagcgtttgaactggaggcgtttgactacattctcaaaccgtatcaggagtcacgtattaccgggatgctgcaaaaactggaagcggcctggcaacaacagcagaccagcagtacgcctgccgcgacggtaacgcgtgagaatgacaccattaatctggtgaaagatgagcgaataatcgtcacgccaattaacgatatctattacgccgaagcgcacgagaaaatgacctttgtctatacgcggcgtgaatcctacgtaatgccgatgaacattaccgaattttgcagcaaactgccgccgtcgcattttttccgctgccatcgctcattttgtgtcaatctgaacaaaatacgcgaaatcgaaccgtggtttaataacacctacattctgcgactgaaagatctggattttgaagtgccggtcagccgcagcaaagtgaaagaatttcgccagttaatgcatctttaatcgggaactttcatgaaagcaccaggcttgcccgccgatcaacaatttttcgccgatctgttcagcggcctggtgcttaacccgcaactactggggcgcgtctggtttgccagccagcctgcctcgttgccggtgggcagtttatgtattgattttccccgtctggatatcgtgctgcgcggcgaatacggcaatctgctggaagcaaagcagcaacgtttggtggaaggagaaatgctgtttattccggcgcgcgcggctaatttaccggtcaacaacaaaccggtgatgctgttaagcctggtgttcgctccgacctggcttgggttatcgttttacgatagccgcaccacgtcgttgttgcatcctgctcgccagatccagcttcccagcctgcaacgcggtgaaggtgaagcgatgcttaccgccctcacccatcttagccgttcgccgctggagcaaaatatcattcagccgctggtgttaagtttgctgcatctttgccgtagcgtggtgaatatgccgccgggcaattcgcagccgcgcggcgattttctctatcacagcatttgtaactgggttcaggataattatgcccagccgctcacccgcgagagcgtggcgcagttttttaatatcacgcccaatcatctgtcaaaactgtttgctcagcatggaacgatgcgttttatcgagtatgtgcgttgggtgcgaatggcgaaggcgaggatgattttgcagaaatatcatctgtcaattcatgaagtggcacagcgttgcggttttccggatagcgactatttttgtcgcgttttccggcgtcagtttggtctgacgccgggagagtacagcgcccgttttcagggctaacgtcagaaggttaattctgtttccagcagcgtcaggatactttgtgcatcttgcgcggcaaacaacgactggcggaagtttttattcaccagtttacgcgccagctgcgagaagactttcacatgattcatcccttcgttagcacccagcgtcagcatgatcaccagttcgacttcgcccatttctgactgccagccaatcggtttcgccagccgggcaatgctgatactggaatgacggatccactgagatttggtgtgcgggatcgctacgccaaaaccaacgccggtggtaacaatctcttcccgctgccagacatcttcttccagctcaaacggatgttcagtgcgcccgttaacgccgaggttgccgcacaggaactggatcgcctgctctttattgctaaaatcctgatcaacaaagatattctccagcgccagcagtgggcgaacgtcttcttccggcgtaaaggcggtgagtaacgcttcaatttcctgcgcactgcggcattcacatgcctgacgcgccagttcccgacacgcctcgctatccagttgacgaagctggcttttcaccgccggaatacgcgggctactcatactcagctcatccaggcccagcccaagcagtagcggcagataacggctttcaccgcccagttcaccgcaaatgcctacccatttgccccgctgatgcgcagtggtaactatttgctgcaacatgcgcaggaacgatggcgtaatcgggttatatagcggcgatacgcgcgggttattacgatcgaccgcatacagatactgggtcatatcgttggagccgatactgaagaaatcgacctcatcgcagaagtggtcgatgatgtagcacaccgacggaacttccaccatgatcccaagcgtaatcgtctctgcatgacgcaggccatcgcgcttaagctcaacgatcgctttttggatctcgcctttcacccataagatctgatcgaggctgtgaaccatcgggatcatcaactgggcgttgccgaaactggcggcgcgcaaaatggcccgcagttgagtgcggaacaggccagcaaattccgggtaaatacgtaccgcgcgatagccgaggaacgggttctcttcctggggaatattcagataaggaatgcttttatcgccgccgatgtccatcgtgcggaagataatcggcttgtcgcccgccgccagtagcacctgctggtaggcttcaaattgctcctgctcgtccggcgcgctgtcgcgatccatatagagcatttcggtacggaacagcccgacaccttccgcgccgttggcaaacgcgcctggcgcttccagagcggtgccgatattcgccgcaatatcaatacgcttgttatcacgggaataggccagctgcgcggcagcctgcgcctgttgtttttggcgtttatccgccagcgtctgcgcgacctgataataaccgctcaccgcgtcattcgggttaatcgccagcacgccgcactgggcgtcaagcactgcaggttgcccggcataacgggcaatcgcatccagcggcaagccactcagtaccgggatcgccgaggcacgggccagaatcagtgtatgcgaggtgcgcccggttttctccagaatcatgcccgcaagatttttcaaatcaaggctcaaaaactggcttggggttaaatcttcagccaccagaatggtcggtttttcaagcaccagcttgttgcgcggcttcagttccggccaggtgatatgcagcaactgttcgctgatatcgcgaatgtcgctaacacgttcgcgcagataatcgctggcagaggcagaaagtttggcgcaaacctgctccatattgctgatgatcgccgcccccagcccctgatgctgttctgtcatcaggcgacggatattgcctgcaaattcatcatcctgaatcagcgacaaatgggcgctgaggatagttttgctttcgccgtcacgctcacgcaattgctggttcagttgctcggcaagcgttgccaggctgtgctccagccgggtggaatcttgcgcactggcggggattgcccgataactgtcgaggctgtcgctttgtaacagggtcagcgtacccacgccgacgccgcttgccagcacattgccgtacagtaaatccgggttaaggcggcttaatgaacgcggcagcggatgcgccgtcagttctgcctgcgtaggctgaacgctgtcgctgtcgataaagcgcacctggatgtactcttccagcacgcgccgcgcctgctcttcatcgctgccgctaatgttcaggctgcaactgtcattaaatagggtgccggtgccaatcagcgccagcgagcttttcgcatctgcctttgcgttctggcgatggttaataaaagtgatttcgctttgccactggctgcactgttctttaagttcccacgccggacgagcatgtagaccgttaggcaaaggacagagaaattgaatcgttaacataaccgctccgggttaatcaggagatcatctgaaatccgtcagttgaacaaccgtctcacgcgtaagacgttgaataagggcagataaaagttgctgcatctgcaaaatgtcgcggcaatcggcaatcgatgcggcgcaatgtccatggcgggttgctggccccatcaccactgtgggcacgccggtgccggttaagtgcaccgccccgccgtccgtgccgccgttgctgaacatatctgcctgcaacggcacgccaatttctgccgccacggtttcgacccaggcggtaagttttggcggcgcaatcagcgacttgtcgcttaacaccagcatcggcccgttaccaatctggcgatggttagccgcgccataatcaaagtttttcgcccagcaggcggtatcaagcacaatggcgacgtccggcgacaccgcgcgggtggcagtttgcccgccgcgtaatcccacctcttcgctggaacttgccaccagccacacttccgcaggtagttcggcgtcgtgcagttcgcgcagtaacgtcaccagcagatagcaaccgaggcggtcatcaaaggctttccccatcactcgctggtgagggagaacctgaaaagtggtatcaaacgtgacgcgatcgccgggacgaattcccgcctgcatcacttcgtcataggagcgcgcaccaatgtccacgcgcatggcgctgacgtcattcccctgccggtcgccgtcaagcaggcctggaattttgcactcttcacgggtggtgatgcgcaccggctgcagctggcgggcagccatgcgtacgttgccaaccggcagcacatcaatcgccccttcgcgggagatgctgcgcaccataaatcccacttcgtccatatgcgcacagatcatcaccttcggacctgtcgattcattcaggcggatcagcaccgatcccagaccatcaaatcgcacttctttttgcaggcgatccgcttcttccagcaggatctgccgcacttcctgttccgaggaggcgatcgcatctgcctcgctcaacgcttttaatagcgataaatccattatgcctctcccgtgagcaacactgttttcggcatggcgtagagcacttctgcgccttgcggggtaaccagcacaacatcttcgatgcgcacgcccccttgccctggcaaataaatccccggctccacggtcagtaacatgcctggctgtagcgtcgtggtgtcccgcggtgaaaaacgcggatcttcatgaacttcaatgccgatagcgtgaccggtgttatgaccgaaatagtcgccataacctgcttctgtaatgacccggcgcgcggcatcgtcaacctgctggcagcgcacgccggggcgaatcgcggagattgctgcgagctgtgcctgcaggacaatttgatagacgttaaacagcaggtgagattcggcgctcaccccttcgccattcaccagcaaggtgcgcgtcatatcagagcagtagccctgatacagcgcaccgaaatcgagagtgacaaactcgcccgctgcaacaatcttgtcgctggctttgccgtgcggcagcgccccacgccagccactggcgacaatggtgtcaaaagaggctttttctgcgccctgctggcgcataaaccactccagttcagcggctatctcgcgctcgctcatccccgcctgaataaagcggcgaatatgctctgcaccgcgatcagcaatcccacaggcgaggcggattttctccacctcctctggcgttttgatttgccgcagcacatccggcgtggcgctaaccagtttcgcattgagttcagactgccagcggtgcgcggtttcccaactcacctgctggccctcaaaaccgagcgtttgcaactgttcatcggcaatgatttgattgacgatagtggtaagcgtgttcgtcgcgtcaagcaaatgcagctggtagccttgcgcacgggcttccacctcaacgtaatagcgcgaatccaccagaatgtgcgcactttcacggctaatcaccacataacctgatccggtggagatccccagatgcggctgtttgttctgccgtgaggagagaagcactgcatccagttgttgcgccttaagccagtcgcgcagcgaagcgagtaatgtcatctggattttccttcttacaggctatcgattaacaatttgcctttacggaacatcatcagacgcaggaacaccaccatcagcgcagttatgactgcccccagcgcgatccccgccatatagacgcccaggttagtgaccagcggccatgcccagatagcggactccgggaaccattgcactgcgcccagccagacagcggcggttgagccgacaatagcgccgaccatatacgacggaatggcggtgatggggctttccagcgcaaacggaatcgcaccctcactgatccccataaacgccaggaacatggcggtcttaccctgcggataaagttgagcgttgaacaggcgtttgccggttaaacgacggtcgataatggtcgccagccccagaccaatcggcggaataacgatagcgatagaacgagcggtgaccggtaatacgtggtcagtggtaaagctgaaggcaacaaaacctgcggctttgttgatcgggccaccaaggtcgattgctgtcgccgcggcgatccccattgcgtacatcagcgcgcccttctcacctgcggcagtcagcacagtacggataccgccgttgatccagccaccaaagggggtgatgacgtagtacatcgccagcatgacaaaaatggcggaaagaatcgggagcaaaaatgtggttttgaacgctaacaggaaatccggtaactggattttctggttcatccacttcacaaggtaaccggcaacgatagaaataatcagcgcaccaatgaaggtggacggcaccggcgaagaggtcgcccattgcatagtgctgggatcgaagttcagcagttgcgtcggctgggtagacatcaacccgccgataaaaccagccgggaacgccagtttgccaccgatagagttcgccacaaaagcagcaaacatcggaatggcaaaaccaaacaacacgccgccgaaggactgcgacagccaggcaaatttaagtaaggagaggtcgaaaccggagaatttcccgctattaagagcatccatgatgccgatctcagcaggaattttaagccagctataagcaatcagctggctgaaagcgaggatcacaccgcccataattaaggtcggcaccatgcgtgaaatccctgacatcacatgctgcgggagttcaccccagaagctggttttagaggcctgcggattcttaactgccgctgccgcaccggatgcgccaggcacaacggttgcactgcgttttttaatggccataacaattatccctgtcgaatattactgttgttcagaggcaatcatctcttcgatttctttgatgatgcccgcagcgtttttaattgcgtcctgcaaagtgatttcataaacgtcgcgtgattcgaaacgttcgttatcttccggggtaactgccacggagtggatgatgatggtcgcttcggcgatatcctgcgccgtcaggcgattctggataccgtccgcgccctgggtttcaattttcacttcataaccggcttctaccgccgcttcttccagcgcctgagcggccataaaggtgtgagccaggcccatcgggcaggcacataaggcaatcagtttcttactcatcgttaattcctcgttcagtgatagttgacgagtgaaattatgaacgtgcaaaacaaatcgccgttaccagacaaataatgcatttactggagaattaatcccgctgtacggaagtgtgacgcaggtcgaccttgtgaggggacacaaagaaaaattgaataaactgtatgatttaaaagattatcgggagagttacctcccgatataaaaggaaggatttacagaatgtgacctaaggtctggcgtaaatgtgcaccggaaccgagaaggcccggattgtcatggacgatgagatacaccggaatatcatggacatattctttaaagcgccctttatcttcaaatgcggcacggaaaccggaggctttgaagaactcaaggaagcgcggcacgataccgcccgcaataaacacgccgccaaatgtcccgagattgagcgccagattgccgccaaaacggcccataatgacgcaaaacagcgacaatgcgcggcggcaatcggtgcagctgtcagccagcgcgcgttcggtaatatcttttggcttgagattttctggcaggcggttgtcagctttcacaattgcgcgatacaaattcaccagcccagggccagaaagcacgcgctccgccgaaacatgaccaatttccgcacgcaatatttcgaggataatggcctcttcttcactattcggcgcaaaatcaacgtgaccgccttcgcctggcaagcttacccaacgcttatcgacatggaccagatgcgcaaccccaagccccgttccggcaccgtaaaccgcaataggcttaccttcgaccggttctgcgccaccaaactgaatcagatgctcttttttcagcatcgggatcgccatcgatacagcggtaaaatcgttaataatttccagatggctaaaaccgagattctttttcatttcggcaattgagaacgcccaggtatggttggtcatcgccacccagtcaccggtaattgggcaagcgatggcaatacagccgtctttcacctcgaccttatgttcttcaagataaacgcgaatgaccgcttcgaggctggggtaatcaagccctgaataggtcttagcctgcgagatttcaccactggcaatatcacacagagcaagacgtgcgttggtgccgcccacatcaccgactaatgcatactttgtcattcttcaactgctccgctaaagtcaaaataattctttctcacactgtaaatacctgggggcataacaacaacgccggaaaggcaggctccctgtaaatatcgatctgggtcacacaattactttatcgtttcagcaccaattgcagcgatgcctttttgcaagctgggcaaactaagtatctgaccccgcataaggaatagaacatgctccatccgcgagccagaaccatgttgttattatcgctccccgccgtggcaattgggattgcgtccagtcttattctgattgtggtgatgaaaatcgcctcggtattacagaatttgctctggcaacgactgccgggaactctggggatagcccaggattcacccctctggatcatcggtgtattaacgctaacgggtattgcggtggggttggttatccgtttcagccagggtcatgccggaccagaccccgcctgtgaaccgctgatcggcgcaccggttccgccctctgcgctacctggacttatcgtagcattaattctcggtcttgctggcggcgtcagcctggggccggaacatccgatcatgaccgtcaatatcgcccttgcggttgccattggcgctcgtctgttaccgcgcgtcaaccgaatggagtggactattttagcctctgccggaaccatcggcgcactgtttggcactcctgttgcggcggcgttgatattttcgcaaaccttaaatggcagtagtgaagttccgctatgggatcgtctctttgcgccgttaatggcggcagcagctggtgcacttactaccggattatttttccatcctcatttttcactgcccattgctcattacggacagatggaaatgaccgatattctcagcggtgcaattgtcgcggcgattgccatcgcagcagggatggtcgccgtatggtgcttaccacggttgcacgcgatgatgcatcaaatgaaaaatccggtgctcgtgctgggtattggcggatttattctcggtattctgggggttattggtggaccagtttcgctgtttaaagggctggatgagatgcagcagatggtggcaaatcaggctttcagcaccagcgattactttttgctggcggtaattaaacttgccgccctggtcgttgctgccgccagtggctttcgcggtgggcgaatcttcccggcagtgtttgtcggcgtggcattagggttgatgctgcatgagcacgttcccgccgtaccagcggcaataaccgtttcttgcgctattctcggcatcgtgctggtggtaacacgcgatggctggttaagtctttttatggcggcagtcgttgtacccaataccacattgctaccgctgctctgtatcgtcatgcttccggcatggctgttattagcaggtaagccgatgatgatggtcaatcgtccgaagcaacagccaccccacgataacgtttagcaaaaaatgctctcctttatgatttaagagttatggcgatgatacggggctttacctccccgtaatattgcgttaacaggccgctgacggcttcgagcgtgaaggagaataacaatgttcaggtcactgtttctggcggccgccctgatggcatttaccccgcttgcagcaaacgcaggtgaaatcaccctactgccatcaatcaaattacaaattggcgatcgcgatcattacggtaattactgggacggtggtcactggcgcgaccgtgactactggcatcgcaattatgagtggcgcaaaaaccgttggtggcgtcatgataatggctaccaccgtggctgggataagcgtaaagcgtatgagcgtggctatcgtgaaggctggcgcgatcgtgacgatcatcgcggaaaaggccggggtcatgggcaccgccattaaacgcgtccgccaatggagcacaatgcctgatgcgacgctagtgcgtcttatcaggcctacaaaccggctctttaacgcgtagggcggataaggcgtttacgccgcatccgccaatagtgccagatgcgacgctcattcaactacaatcccagcgccgtccccaccaacaaccagatattcagcgccacgaccagcaccacaatcacccagcctgtctgttttacgcgtttgctgttcaccagatcgcccatcaacttgctgtcactggtgaaaatcagcagtggaaccagcgccagagcgataccaaaacttaacagtacctgactcataaccagaatccgtgtcggatctaatcccatcagaatgacaataaatgacggcaacatggtgactgtacgacgcacccacagcgggatatgaaagcgaatgaagccctgcatcaccacctgccccgccagtgtccccaccaccgttgaagacagccccgcagcaaccaggcttaatccaaagaccgttgccgcagcgtggcttaacagcggttgcagcgtcagataagcctcatcaagatcggcaacaccagtatgaccggaaaagtggaacgccgccgcagctgtagccatcatcgccagattgacaaaaccggcaatagtcatggcgatagccacatcccatttggtggcggaataacgttgttgacgcgaaccgccatgtaaatgctgagtgagcgaggagtgcaaataaatcacatgcggcataatcgtcgcccctaacacgcctgctgccaggaagaccgcttccgaagtaggtaaactcgggatcaccattcctttacccagctgcgccaggttaggctgggagaaaatcaactcgacaatgtaagccgcggcaacaaacaacagtaacccgccaatcactttctccagcggtttttgcccgcgacgttgcagcattaaaatcaggaaagtcgcgatccccgtcagcaccgcgccctgcaacaacgaaacaccaagaatgagtttaaaaccgatcgccgcaccaataaattccgccaggtcggttgccatcgcaataatttctgcctgaacccaatagaaccacactacgggacgcggatagtgatcgcgaatctgctccgccagatttttaccggtggcaatccctagtttggcagagaggatctgaatcagcatcgccatcaggttggcccaaacgacaacccacagtagctgatagccgaagctagcacccgcctgaatattggtcgcaaagttaccgggatcgatataaccaatcgccgcaatgaacgcaggtcccattaatgcgagcctcatcttgcgcgccgcccgtccgctgctactctcaacgcgatagttcgtcatcttgtgcctctaaaacatagcctttgctatgtttcatgctatgccaaacgagaatgattatcaaattcatttaaatggattgtggtgatttctctgatagaccaggattatgactacgaaaagattgatgacttgaatgttatggttatgtttaatgttagcacatttacataactttcagcttccatacacaacatagcagaaatgtatgacagatcactatttttgaagcctgtcacaggacgtcattatagtgtgtgtcagatctcgttttccttaaccatgttacatagaatgtgcacggaaatttaacctgcctcatatttggagcaaatatggaccgcgtccttcattttgtactggcacttgccgttgttgcgattctcgcactgctggtaagcagcgaccgcaaaaaaattcgtatccgttatgttattcaactgcttgttatcgaagtgttactggcgtggttcttcctgaactccgacgttggtttaggcttcgtgaaaggcttctccgaaatgttcgaaaaactgctcggatttgccaacgaagggactaacttcgtctttggtagcatgaatgatcaaggcctggcattcttcttcctgaaagtgctgtgcccaatcgtctttatctctgcactgatcggtattctccagcacattcgcgtgttgccggtgatcatccgcgcaattggtttcctgctctccaaagtcaacggcatgggcaaactggaatcctttaacgccgtcagctccctgattctgggtcagtctgaaaactttattgcctataaagatatcctcggcaaaatctcccgtaatcgtatgtacaccatggctgccacggcaatgtccaccgtgtcgatgtccatcgttggtgcatacatgaccatgctggaaccgaaatacgtcgttgctgcgctggtactgaacatgttcagcacctttatcgtgctgtcgctgatcaatccttaccgtgttgatgccagtgaagaaaacatccagatgtccaacctgcacgaaggtcagagcttcttcgaaatgctgggtgaatacattctggcaggtttcaaagttgccattatcgttgccgcgatgctgattggctttatcgccctgatcgccgcgctgaacgcactgtttgccaccgttactggctggtttggctacagcatctccttccagggcatcctgggctacatcttctatccgattgcatgggtgatgggtgttccttccagtgaagcactgcaagtgggcagtatcatggcgaccaaactggtttccaacgagttcgttgcgatgatggatctgcagaaaattgcttccacgctctctccgcgtgctgaaggcatcatctctgtgttcctggtttccttcgctaacttctcttcaatcgggattatcgcaggtgcagttaaaggcctgaatgaagagcaaggtaacgtggtttctcgcttcggtctgaagctggtttacggctctaccctggtgagtgtgctgtctgcgtcaatcgcagcactggtgctgtaagaccatacataaaaaagccggggataattcccataagcgctaacttaagggttgtggtattacgcctgatatgatttaacgtgccgatgaattactctcacgataactggtcagcaattctggcccatattggtaagcccgaagaactggatacttcggcacgtaatgccggggctctaacccgccgccgcgaaattcgtgatgctgcaactctgctacgtctggggctggcttacggccccggggggatgtcattacgtgaagtcactgcatgggctcagctccatgacgttgcaacattatctgacgtggctctcctgaagcggctgcggaatgccgccgactggtttggcatacttgccgcacaaacacttgctgtacgcgccgcagttacgggttgtacaagcggaaagagattgcgtcttgtcgatggaacagcaatcagtgcgcccgggggcggcagcgctgaatggcgactacatatgggatatgatcctcatacctgtcagttcactgattttgagctaaccgacagcagagacgctgaacggctggaccgatttgcgcaaacggcagacgagatacgcattgctgaccggggattcggttcgcgtcccgaatgtatccgctcacttgcttttggagaagctgattatatcgtccgggttcactggcgaggattgcgctggttaactgcagaaggaatgcgctttgacatgatgggttttctgcgcgggctggattgcggtaagaacggtgaaaccactgtaatgataggcaattcaggtaataaaaaagccggagctccctttccggcacgtctcattgccgtatcacttcctcccgaaaaagcattaatcagtaaaacccgactgctcagcgagaatcgtcgaaaaggacgagtagttcaggcggaaacgctggaagcagcgggccatgtgctattgctaacatcattaccggaagatgaatattcagcagagcaagtggctgattgttaccgtctgcgatggcaaattgaactggcttttaagcggctcaaaagtttgctgcacctggatgctttgcgtgcaaaggaacctgaactcgcgaaagcgtggatatttgctaatctactcgccgcatttttaattgacgacataatccagccatcgctggatttcccccccagaagtgccggatccgaaaagaagaactaactcgttgtggagaataacaaaaatggtcatctggagcttacaggtggccattcgtgggacagtatccctgacagcctacaaaacgcaattgaagaacgcgaggcatcgtcttaacgaggcaccgaggcgtcgcattcttcagatggttcaacccttaagttagcgcttatgggataattccccggtttttttacgcctgttaatcagctaatggctgcgggcgaccaatcaaatacccttgcagatattgcaccccgagcttatgcaatagcgcctgctgctgttgcgtctcgacaaactccgcgaccacactcaatgacttcgctttcgccagatcggtaattgatctcacaatcatcgcatccagcgtgttcgtgacaatatctttcacaaagacgccatcaattttgatgatatcagcctgcaaacgctttaaccgttcgtagttggcatatccggtgccaaagtcatcaatcgcaatccggaaaccaaacttatgcagctgctcgatgttgtacatgctgctttctgcgttagaaaacgcctgctcctcggtgatctcaagaatgaccgcctgcggggagatgtgataacgcttaaacagacgaataatccgcccggcaatattcttttgcagcagcgtgagcggcattaaattgactgaaaagcgcggtccttttttgtcgcaagggtgtgttgccagccacttcaacaaggattccagcacttgcaaatcaaaacgcgcgctaaggttaaactgagcaataaggggcagaaacttatccggggtcataatgccgccgtcatatttcagtcgcgcgaggatctcatcataaccttcaccctctttgttgcgaattggctgggcgtagagcagcaaatcaccctgatctaacgccgtgcgaatggtattcagcaatagcacctgtttagtggtctgcccggaaaccatctcctctctgctatccagcgccagcacatgatgatgtgcgcaggattgctccgccagccagcttaactgccccaacaagggttgcagggtttcctgatttccatcaaaacgcccccaggcagcaccatagcccatatccagcccggtattgttccagtgaatttgccgactattcaggatgttaaccatatgctggagtcgcccttccgtttccggcccgctcagcactaacagcagttcactacccggcaattgatacaacttttcgttttcctgcatcaacggcagcagcgtacggcaaattgagcggatacagtgaacgcgcatcattaagccgtaatgacgactcataaactcaagattatcaatgcgcaggcagcaaaaactcttgcccgcctcttgctccggcgcttgttccaacgcacgaaagttgggtaggagcgttaacggatctgtcagcgcctgcaaatgccagcggcgattaagccattcactgcgatgataaatgcgcaccatatagagcaggcaaacgctaaaggaaatcagcaccgcaagaataaatgccagcgaatattcggtttccaccccttgcaaaaagttctggttgtaattcagaaggcaaagcgttgaaacagcccaggtgagatttaaaaacggatagcgaagcttaccgaccccgagggtaaagatgatgaagaaaacgggtaccaggtaaccggcaataaagtcgttttcataaggtgtgcacaacagaagtagcagcacgcttaacgctgccagccagcttaaggtaaatgcgcgtttctctttgcccaacgacggagcgatatccctgcgccacaatatctgcgcaaagtggggacttacaatcatgcgagtgagatagtagaaaagcatgttgtaaatcagcacagcggtgaaaaggcttagcaaatcaacgaccgtgaaaatggcatccgcatcgccgaaaaaggtggatatctttagcgggaaatcaaagaagctccccacaagatacatgctgcatttgatgccgatcggcgtcaccaaaccaagccagaacagacgttgccagacatatcggctggtcaatccataacgccaacgcgtccccagctgccagcgtaatattgcgcaggcacacaacacgacaaacgtctggctaccgagcatgaccgcagtctgtaaaaaagagagatgaaagttccacagattggtgcaaaacatcccgcataaaacgggaacgacaccgcgccagccaaagataaacaagattgacagcattacgcacagtggcatccacgccagaaagatataactggaatggataatggcaagtggcgaaataaaacgggatagctgaataagtaccacggtgagcgtaaacgctagtgtgaatatcttgatattttttatcaggttatgctccacaaacatgagtacactactctcactgatcggggttttcaggcacacaaataataagtttattcgcatcgcgaagcaaacagggggccagcctgttgccgatttttcatccaatgatgctttcaccaggcggcactaacccggacgtagactgtattacaaaagcggcaaaaagcagagacaaaaaacccccgctttgcagcgagggttggaaatttggtggagctaagcgggatcgaaccgctgacctcttgcatgccatgcaagcgctctcccagctgagctatagccccacgatgcgtttacgtaccaagtttgctgggtgcaaaatttggtggagctaagcgggatcgaaccgctgacctcttgcatgccatgcaagcgctctcccagctgagctatagccccgtcacgtaaagcttgtcgagttgacgggcggcatcatatgaattccgcccgaatgtgtcaacggcaaattgcaacgtgtagtttcaatcgctgaaaaatcaggcaaatgaacaattttggaaaaccgctcgcattcagtagttattcatgtcacggtttcctgtaaagtggtgttataaaatgaactactaatagacccacatacattcagggaattgttatgttcaaggagaggatgacaccagatgaacttgccagactgaccggctatagccgccagaccattaataaatgggtacgcaaggaaggctggacaacgtcaccaaaacctggcgtccagggtggcaaagcccgactggttcacgtcaatgaacaggttcgtgaatatattcgcaatgctgaacgtccagaaggtcagggagaagcgcctgccctttctggtgatgcgccgcttgaagtattgctggtgacactggcgaaagagatgacgccagttgaacaaaaacagtttacatccttgcttctgcgggaagggattatcggattgttacaacgcttagggattcgcgatagcaaataatatgaaaagattacgcaataaaatgaccaccgaagaactggctgaatgcctcggtgtggctaaacaaactgttaaccgttggatcagagaaaaaggctggaaaacggaaaaatttcccggcgtgaaaggcggtcgtgccagacttattctggtcgatacgcaagtttgcgagtttattcagaacacgccagccttccataacacaccaatgttgatggaagctgaagagagaattgctgaatacgctcctggagcacgcgccccggcgtatcgacaaatcatcaacgcgatagataatatgacagacattgagcaggaaaaagtcgcgcaatttttgtcacgtgaaggaattcgcaatttcctcgcccgtctcgatattgacgaatcagcataaataaaaaacggcaggatattatctcctgccgtttatctttttacacgctaattactgctgattttcgcgttcagcaataaaatccagcgctttgttgatacgctcgatactgcgggtcttaccaattgcgtgaacggtaacatccagtgctggagactgccccgcaccggttacggcgacacgcagcggcataccaactttacccatacccacttccagctcatccgccgtcgcctgaatagcgtgatgaacgttttcagcggtccagtcagtaatcgcggccagtttgtcacgaaccacttccagcggctgacgcgctaccggacgcagatgttttttcgcggcgtcggcatcgaactcagcaaaatcttcgtagaaataacggcagctctgtgccatctctttcagcgtcttgcagcgttcgcccagcagtttcaccagatcagccagctgcgggccgttacgggtatcgatattttcctgctcaatgtgccactgtaagtgagtagcaacatactccggcggcagcgcgttaatgtagtgatggttcagccacagcagcttgtcggtgttgaacgcactggcagatttgctgacggcattcaaagtgaagtatttgatcatctcttcacgagtgaagatttcctgatcgccgtgggaccagcccagacgcaccagatagttcagcagtgcttctggcaaataaccgtcatcacgatactgcattacgctgactgccccgtgacgtttggacagttttttaccgtcatcgccattgatcatagaaacgtgcgcgtaaaccggcaccggcgctttcagggccttaagaatgttgatctggcgtggcgtgttgttgatatggtcttcgccacggataacgtgggtgatttccatatcccagtcatcgacaaccacacagaagttataggttggggaaccatcggtacggcggataataagatcgtccagttcctggttgctgaactcgatcggaccacggatctgatcgtcaaaaacaacagaaccttcctgcgggttagcaaaacgtacaacacacggttcatcatcagcatgatgctcatggctgtggcggcagcgaccgtcataacgcggcttctcacctttcgccatttgctcttcgcgcagcgcttccaggcgctctttagagcaatagcatttataagcagtgccctcttccagcatctgatcgatcaccgcgttgtagcgatcaaaacgtttggtctggtagtacggaccttcatcccactccaggctcagccagttcatgccatccataatggcttcgatagcttccggcgtggaacgctcaagatcggtgtcttcaatacgcagcacgaactcaccgccgtggttacgtgcaaaaagccaggagtaaagagcagtacgcgcgccgccaacgtgcagatagcctgttgggcttggcgcgaagcgagttttgattttcatgaaatggccttacgtttagaaagatgccgacaaccggcaaatcctggaaaaattaagtgggcgatattctatcactcccgcctgattcctcaatgtagttcgggtttctaccttacgcattattgttttcgttgacaaattgcgcaacacggtctgttttgcgatcatcttgcttaaatttacgacgaacgaacaatttctttagaaaatgcgttgactcattttgaactctccctataatgcgactccacacagcgggggtgattagctcagctgggagagcacctcccttacaaggagggggtcggcggttcgatcccgtcatcacccaccaactactttatgtagtctccgccgtgtagcaagaaattgagaagtgggtgattagctcagctgggagagcacctcccttacaaggagggggtcggcggttcgatcccgtcatcacccaccactttctcgccagctaaatttcttgtaaaaatgtgaagtaccgaagtgggtgattagctcagctgggagagcacctcccttacaaggagggggtcggcggttcgatcccgtcatcacccaccacttcgggtcgttagctcagttggtagagcagttgacttttaatcaattggtcgcaggttcgaatcctgcacgacccaccaatgtaaaaaagcgccctaaaggcgcttttttactatctgcgatactcaaagattcgaacctgcagcaggtttgagttgagcgcagcgaaacaacggagccgctcgcggcgacggcccgaagggcgagcgaagcgagtcatcctgcacgacccaccaatgtaaaaaagcgccctaaaggcgcttttttgctatctgcgatttgcgaaattgcctgatgcgcttcacttagcagactactatttccggcaattcctgtctcctcacctactgtgtcaatgcagccaacagcttaaccatcgcgggcgtcacctgctgtgtttcataaacaatatataaatctgcagggatgcgctgtttgagcggacggaaaatgacacctggccagttcatttgtgcgtagctgtccgctatcaatgtgataccaatgcccatactgaccatagcgagtaccgtttgcggttcattaacttcgcgaataacaaccggtgaaaatcccacctgctggcaaactcgctgcaaaaaatcccagtcagtgtaaacgggcggcattgtaacaaaatactcgtcacgtagcgcttccagcgggacggtggaaaatgatgagagatgatgctcttcaggcatcgccaccagaaacgccgattcatgcaaccgtaagctggtaaaaccagtcggtggttctgtcgccattcgccagatcccggcatcaagttcgcggcgttccagcaaggccatttgcatcgcgggcatcttttcgcgaaaaagaacgtcaacgttaggattttccctgaggaatcgccgcataaccgggcgcatccgtccccacattgccgttcccactacgccgagttcaatccgccctgcttctccccgacctatttgttcaatccgagccaatacattattagcattcaccagcaatcgacgcgattcttccatcaagattttgcccgcgtgtgtcagtacgacgctgcgcgaatggcgaataaaaagctgcgtgccgagttgattttccagctctttaatatgaatgctgagcggaggctgagacatatttaaacgcgctgctgcgcggccaaaatgcaactcttccgctacggcaagaaaataacggagcaacttaagatctgttctgtatacgcgttccataattaagtgctccatataataaatacatcgtattaaattatcatggcataaagtatttcaccaccagatatccgacatacataaacacaatggataatatacccggtaatacatttggtacaggaataggcaagcgcacgattgtaaacaaagcaccaataccaaaaccaacgccggaagaaaataaaatatctttcactaattaacctttatcataaaagcagctctgaagagcagagccgcgaatccttttaatgagtcaccgctcgatgctttatcttttcagggtcatgattatatttaaacccaaagaaaaatatcactgcgagaaaaagagcatatcctgcaaacaccagccagatagtttgccagtcttttacgccatccaccgaaaagtaatctactgccatgccactcagaatcgagccaacccatgcgccgacaccatttaccatggtcataaagagcccctgcgcgctggcacgaatgctggaatcaacttcctgttcgacaaataccgaaccagaaatattgaagaaatcgaatgcacagccataaacaatcatcgacagcagcagcaaaataaatccggttgttgacggatcgccataggcgaagaagccaaagcgcagcgtccaggccaccatactcatcagcatgacggttttaatgccaaatcgctttaaaaagaatgggatagtcagtataaagcccacttctgccatctgtgaaactgacagtaaaatggagggatatttcaccacaaaactgtcagcaaactccgggttacgggcgaaatcatgtaggaacggattaccaaaaacgttggtaatttgcagtaccgcacccagcatcatggcaaagaggaaaaagatggccatgcgtggatttttaaacagcacgaaggcatccagacccagcttgctggcaagcgatgtggtcgcttttttctccgcaaccggaatcttcggcaaagtcagcgcataagccgacagcagcaatgacgcaccggacgcgatatacagctgcagactactcaattccagatgcagcaggcttactgcccacatcgcgacaatgaaccccaccgtaccaaaaacgcgaatgggcgggaaagcggtcaccgggtcaagccctgcctgggcaagacaggaataagagacgctgttcgataacgcaatagtcggcataaacgccatcgcattgactaacatcacccaaaacatcatatccggatcagttacggatgccgcataaaaaagtacgcccgcacacaccaggtgacacagcatgtatgcacgttctgcgcgcagccatttgtctgcgatgatccccattataccaggcataataatcgcggcgatccctttggaactgtaaaccatgccaacattagcgccggtgaaatgaagagtattaatcatgtaagagccgagggtaaccagccagctcccccagataaaatattgcaaaaaggacattacctttaagcgcatcgcgatgctcataatcgtttccttgtcgcatcatttggcctcacccgcgaggccgtttcttattgtttttctcaggcaattttgcgcagaaagccacaaataaggttgatgaagttctgcttagagagctccgcagccgccagcgtttgcgcatgtgacaatttcacatcgcttaaaccttccgccatattggtaatcgcagagaccgcaacgactttaaggtcgcaatggcgagctgaaataacctcaggcaccacagacataccaacaacatccccaccaataatttgcatcatgcgaatttccgccgcagtctcgaaattcggccccggatacgagacgaacacgccctccgtcagagggaaaccctcttctttcgccactttttgtaacagtgcgcggtattccgcatcgtaggcatttgccagtgagaagaagcgctctccaaaacgatcatcgttaagacccaccatcggcgtaccgggcatggtgttgatatgatctttcaatgcgaccaggctgcctgcccccacttccggacgcagcgagcctgccgcattggtgcagaacagtagctcgcagcccagcagcttaaaggtacgaattgcgtcagtcataatggtcattccacgaccttcgtagaaatgtccgcgacctttcatacataccaccggtacgccctggagatggcccagcactaactcccccgcatgaccatgtaccgtacttaccgggaagcccggcagcttttcgtaggaaattgcgacagcgttctcaatctgatcggccagcgcgccgagcccggaacctaaaataaaggccactcgtggcgtgaaatcaggtttataagtcttgataatatctatgcaaaacagcgggttatgagaaaattgaacctgagacatacatatcctttttctgtagggtggaatctaacgcctttttatagcgaggttgtcccggctcttaccaatacacttttctcacgcattcaatagcgattcgatatcgatggatttatatcttttctctattaatccacggtaaaaactgtattggcgatattaattcctttgcattaacaatatgtcgtttttagcaaaccactttattaagcaatctactaataacgatcggcatagggaattatgctatgaaaaaacatcttttaactctgacactttcctctatattagcgatacctgttgtatctcatgcagaatttaaaggcggttttgcagatatcggcgtgcattatctggactggaccagccggactaccgaaaaatcgtcgaccaaatcacacaaagatgattttggttatcttgaatttgaaggtggcgctaactttagttggggagaaatgtacgggttcttcgactgggaaaacttctataacggtcgccataataaaccaggtagcgagcagcgttatacctttaaaaataccaaccgtatttacctgggtgacaccggatttaatctctacttgcatgcgtatggcacctacggttctgcgaatcgcgtgaatttccacgacgatatgttcctgtacggtatcggctacaatttcaccggcagcggttggtggttcaaaccgttctttgctaagcgttatacagatcaaacctattacactggcgacaacggctatgtcgccggctgggttgcaggttacaactttatgctgggcagcgagaaattcactcttaccaactggaacgagtacgagtttgaccgtgacgctacctatgcagcgggtaatggcggtaaagaagggctgaatggcgcagttgcactgtggtggaatgcaacatcacacattactacggggattcagtatcgatatgcggatgacaaactgggcgaagatttttaccaggatgcgataatctactccatcaaatttaacttctgattgattactgccggggctcccggcagtatgaattcactctatatctgatacaacggatccccttcccgcccagccattagcgcattgccctggtctcgtaccacgtcccataaagcttcagcggcggtggaaagtgaacggttcttcctgcgcaccagcatcaactggcgttcaacaaccggcgtaatgcgctttaccaccagtgggctaccttcaggcaatggtagcgccagtgcgggaagaatactgatgccgatgcctgcggctaccatcgggaacagcgtcgccggatgtccaatctcctgcacaatattcgcctgaataccattgcgcgccagcgctgcgtcaatcagcggtcggctgcctgacgcgtaatcctgcaacaccaatttcgctccctgtaatgcctgccagggtacataatcttccacggccaaagcgctatcgcgatggcaaagcagaaagaaaggctcggaaagaatcgcttcacattgcagatcgcccactgggcctggatcgatgacgatgccaaaatcgacatctccctggcgaatactttccattacccactgctgcggacgatcgtgcaggacaaactgaatatctggatagcggcgatggctttcagcaatgcattgcggaataagatgcgcggaaatggtctggctggcagcgacccgaacttttccgctcagttgttgccccatacgcccggtatcgcgcaacgtgctgttcagttcatccagcagtcgctcaagacgcaaagccagctgctgccctgcatctgtaagcaccacttcacgcgtggttctgtccagcaggcgaacaccagtatgattttccagttccttcacactgtgactcactgccgactggctcaggccgatacgctctcctgcacgactaaaacttttctcctgcgctactgtgacgaaaacctttaattgttttaaagaataattcatctgttttcttcatgaatggatgcaataaatcaattttatttctcaaactggaagaagcacaatagaaccatcgatcatctggagtctttatgaaactttttcgtatcctcgatcctttcaccttaaccctgatcacggtggtgttgctggcctctttctttccggccagaggcgatttcgtccccttctttgaaaatctgaccaccgcagctattgccctgctgttctttatgcacggcgcgaagttgtcgcgtgaggcgattattgctggcggtggtcactggcgactgcatttgtgggtaatgtgcagcaccttcgtgctgtttccgattctgggtgtactgtttgcctggtggaaaccggtaaatgtcgacccgatgctctactccggttttctctacttgtgcattctcccggctaccgtgcagtctgcaatcgccttcacgtcaatggcgggcggtaacgtcgcggcagcggtttgttctgcgtcggcatccagcctgctggggattttcctttcaccattgctggttggtctggtgatgaatgttcacggtgcagggggcagccttgagcaggtcggtaaaattatgctgcaactgctgctgccgtttgtgttggggcatctttcccggccgtggattggtgactgggtgtcgcgcaataaaaaatggattgcgaaaactgaccagacgtccattctgttggtggtttatacagcgttcagcgaagccgtcgttaatggtatctggcataaagttggctggggatcattgctgtttatcgtggtggtcagctgcgttcttctggctatcgtgattgtagttaacgtctttatggcacgccgactgagcttcaataaggcagatgaaattactatcgtcttttgtggttcgaaaaagagtctggcaaatggcatcccgatggcaaacattctgttccccacatcggtgatcggtatgatggtgctgcccctgatgattttccatcagatccaattgatggtctgtgcggtgctggcgcgtcgatacaaacgccagaccgaacagttacaggcgcagaggaaagcagcgccgataaagcttaaagcggacgcttcaggggctggaccagttgcgtcagcccctcggttttaatcagcagcgtgatttgcattagctcaccgagcttcctgccgggaactcatctttgcgggcaaaccacagcagatactcctccggcaggtcgattaagcgacgccctttgtatttgccaaacggcattatcgtattggctatttcaatcagctgctctttttccatctcagctacccagcaaacgcagcatttccgcttcgtcgatgacttcaatgcccagttcctgcgccttcgccagtttagatcctgcagcttcacccgctatcaccagatcggttttcttcgacacgctgcccgcgactttcgcgcccagttcgaccagtcgagctttagcgtcatcacgcgacatctggcttaagctgcccgtaagcaccacggttttaccagcaaacgggctgtcaatctcttccgcgttgataacgatcggcgcaggccagtgaacaccttccgccaacagctcgctgatgacattgcggttgctttcttcggcaaagaagttgtgaacgtgggatgcaacgacaatgccaacatcaggcaccttttgcagctcttcaatcgaagcggcttccagcgcttccagcgtgccgaaatatgccgccagacctgctgcggtggcctcgccgacttcacggatgccaagtgcatagaggaagcgagcaaaggtggtttctttcgctttttccagcgcgttaaccacgttttgtgccgattttggccccatacgctccagtccggtcagtttgcctgcggtgagtttgaacagatctgccggagtatggacatattctttttcaaccagctgatcgatgattttgtcgcccattccgtcaacatccatcgcacggcgggaaacaaagtgtttcagcgactctttacgctgcgcaccgcaaatcaggccaccggtacagcgggcaaccgcttcaccttccacacgctcaacgtcagaaccacataccggacaatgcgtcgggaatacaacctcacgggtatcttccgggcgttcagaaagcacgacgttaaccacctgcgggatcacgtcgccagcgcggcgaatcaccactttatcgccaatgcgtaaaccaagacgttcgatttcatccgcattgtgtaaggttgcgttactcaccagcacgcctgcaacatggacaggttccagacgcgcaacaggcgtaatcgcgccagtacgcccaacctgaaactcgacgtcacgcacaaaggtcatctgctcctgcgccgggaatttaaacgctaccgcccagcgcggggcacgcgcgacaaagccaagctgctcctgctgtgccagtgagttgaccttaatcaccacgccgtcgatatcaaagcccagcgtcgggcggtcttcttccactttgtgatagaacgccagcacttcttccgccgattcacaaagcgttacccgatcgctgaccggcaacccccactttttaaattgcagtaaacggccaagatgagtatccggcagctcgccaccttccagaacaccaacgccatagcagaaaaaagtgagcggtcgcttcgctgtaatacgcggatcaagctgacgcagtgaaccagctgccgcattacgtgggttagcaaacactttcccgcccgtgcgtcgcgcatcttcgttaatcttttcgaaccccgcctgcggcaggaacacttcaccacgcacttccagacgcgccgggatattctctccgtgcagcttcagcggaatggcgcgaatagtacgcacattagacgtgatatcttccccggtggtgccatcgccacgggtcgcggcactgactaaaacgccattttcatacagaatactgacggcaagaccatccagcttcagctcacagcaccaggtgactttctcgttgtttttcagacggtcctgcacacgtttgttgaaagcaagaaagctttcttcatcaaaaacgttatccagtgacagcattggtacttcatggcgtatctggctgaaagccgccagcggcgcagcgcctacacgttgagtaggcgaatcaggcgtaatcagttctggatgtttggtttccagctcgcgcagttcgcgcatcagcctgtcgtattcagcgtcgggaatttccggcgcatccatcacatgataaagatattcatgatggcgaagcgtcgttcgcagttctgtcagttgttgttcgattgattccatatcgcaccatcaatgctaaaaacccccgacaagcgggggttcgaagaggagttaatttgccttaagtgtatcaggcgttggcgtctttgacttcgcggatgatgtcctggtactcgcgcaatttctgcggagtcatcatacggcgctgatcgtcaagcacgacaccgcccacttcatcggcaatatgctgcgcagattgcagcatcagcttgaagttctgcagctcgtcaccgtaagacggtacctgcataaagatagtgacacccggagtagtgaaatccttcatttcaggatcaaaggttcccggtttcaccatattcgccaggctgaataacgccgggccgctgccatccgggctaagatgacgatggtaaatattcatatcgccaaaaatgaagcccgcttgttgaatgctgttaagaagcagttcaccgtttagctcgctaccgtgatgcgccgcgacgttcatgataatcaccgcttctttgcgcttcggtttatccataactggagcaggttccgctacaggctcaggctgtggtgccgctacgggttctgcaggctggaaagcctgttgtgccggttgcggtgctgaatgcacaggctgcggcgctggcgcgacctgtggcgaaactggctgctgcaacggctgttcaggctgcggctgataggcaggctgctgcaccggctgcgctggatgcggagcatgttgcggcggtacctgcgcttcaggcggctgctggaccggttgacgcggctgcgcagacgcataaggcggttggtactggtgttgcggcgacggacgagcagcctcatgctcctgagcgttagccggggcatgattcacgcggtgaacacgaacctcaccaacgccctcatcatcttcgacatcctcgtcataagaatcgtcgtcacgttttgacttcattcgttttaatggccgatcgcggaacatagaagatcgttctttacggctggtccagaaaccatgtaccagtaaagcgattatggcgatcgcgccaacaatgattaatatcagacgcaaatcctgcatcattatattctctgttgttctaacaccttgccaccacggcaaacatttactcaactaagagtatttgccgattacctcaagtgcaagtgcactattaactttcacagcacaaagatagatgaaatcgtgctttttgctgttttttcgaacatatcctaactgtccattgcgcaattacccggtaaaatacgcagaattttcctgggattggtcaaaaggagctcatcctgattatggtttcatcattcacatctgccccacgcagcggtttttactattttgcgcaaggctggaagctcgtctcgcaacctgggattcggcgtttcgttattttaccgctgctggtcaatattttgttgatggggggcgcattctggtggctctttacacagctcgatgtctggatcccgactctcatgagttacgttccggactggctacaatggctgagttatctgttgtggcctctggctgtcatctctgtgctgttagtgtttggctatttcttctccacgattgctaactggattgccgctccgtttaacggtttattggctgaacaactggaagcacgattgactggcgctacaccgccagataccgggattttcggtatcatgaaagatgtgccgcgaatcatgaaacgcgaatggcaaaaatttgcctggtatctgccgcgcgcaattgtattactaattctttacttcatccctggtattgggcaaaccgtcgcgccggtactgtggttcctgtttagcgcctggatgttagccatccagtattgcgattaccccttcgataaccacaaagtgccgtttaaagagatgcgcaccgccctgcgcacacgcaaaatcaccaatatgcagtttggtgctttaaccagcctgtttacgatgatcccgctgcttaatctgttcatcatgcccgttgccgtttgtggcgcgacggcgatgtgggtcgattgctatcgcgataaacacgcgatgtggcggtaacaatctaccggttattttgtaaaccgtttgtgtgaaacaggggtggcttatgccgccccttattccatcttgcatgtcattatttcccttctgtatatagatatgctaaatccttacttccgcatattctctgagcgggtatgctacctgttgtatcccaatttcatacagttaaggacaggccatgagtaagatttttgaagataactcgctgactatcggtcacacgccgctggttcgcctgaatcgcatcggtaacggacgcattctggcgaaggtggaatctcgtaaccccagcttcagcgttaagtgccgtatcggtgccaacatgatttgggatgccgaaaagcgcggcgtgctgaaaccaggcgttgaactggttgaaccgaccagcggtaataccgggattgcactggcctatgtagctgccgctcgcggttacaaactcaccctgaccatgccagaaaccatgagtattgaacgccgcaagctgctgaaagcgttaggtgcaaacctggtgctgacggaaggtgctaaaggcatgaaaggcgcaatccaaaaagcagaagaaattgtcgccagcaatccagagaaatacctgctgctgcaacaattcagcaatccggcaaaccctgaaattcacgaaaagaccaccggtccggagatatgggaagataccgacggtcaggttgatgtatttattgctggcgttgggactggcggtacgctgactggcgtcagccgctacattaaaggcaccaaaggcaagaccgatcttatctctgtcgccgttgagccaaccgattctccagttatcgcccaggcgctggcaggtgaagagattaaacctggcccgcataaaattcagggtattggcgctggttttatcccggctaacctcgatctcaagctggtcgataaagtcattggcatcaccaatgaagaagcgatttctaccgcgcgtcgtctgatggaagaagaaggtattcttgcaggtatctcttctggagcagctgttgccgcggcgttgaaactacaagaagatgaaagctttaccaacaagaatattgtggttattctaccatcatcgggtgagcgttatttaagcaccgcattgtttgccgatctcttcactgagaaagaattgcaacagtaatgccagcttgttaaaaatgcgtaaaaaagcacctttttaggtgcttttttgtggcctgcttcaaactttcgcccctcctggcattgattcagcctgtcggaactggtatttaaccagactaattattttgatgcgcgaaattaatcgttacaggaaaagccaaagctgaatcgattttatgatttggttcaattcttcctttagcggcataatgtttaatgacgtacgaaacgtcagcggtcaacacccgccagcaatggactgtattgcgctcttcgtgcgtcgcgtctgttaaaaactggcgctaacaatacaggctaaagtcgaaccgccaggctagactttagttccacaacactaaacctataagttggggaaatacaatgttccagcaagaagttaccattaccgctccgaacggtctgcacacccgccctgctgcccagtttgtaaaagaagctaagggcttcacttctgaaattactgtgacttccaacggcaaaagcgccagcgcgaaaagcctgtttaaactgcagactctgggcctgactcaaggtaccgttgtgactatctccgcagaaggcgaagacgagcagaaagcggttgaacatctggttaaactgatggcggaactcgagtaatttcccgggttcttttaaaaatcagtcacaagtaaggtagggttatgatttcaggcattttagcatccccgggtatcgctttcggtaaagctctgcttctgaaagaagacgaaattgtcattgaccggaaaaaaatttctgccgaccaggttgatcaggaagttgaacgttttctgagcggtcgtgccaaggcatcagcccagctggaaacgatcaaaacgaaagctggtgaaacgttcggtgaagaaaaagaagccatctttgaagggcatattatgctgctcgaagatgaggagctggagcaggaaatcatagccctgattaaagataagcacatgacagctgacgcagctgctcatgaagttatcgaaggtcaggcttctgccctggaagagctggatgatgaatacctgaaagaacgtgcggctgacgtacgtgatatcggtaagcgcctgctgcgcaacatcctgggcctgaagattatcgacctgagcgccattcaggatgaagtcattctggttgccgctgacctgacgccgtccgaaaccgcacagctgaacctgaagaaggtgctgggtttcatcaccgacgcgggtggccgtacttcccacacctctatcatggcgcgttctctggaactacctgctatcgtgggtaccggtagcgtcacctctcaggtgaaaaatgacgactatctgattctggatgccgtaaataatcaggtttacgtcaatccaaccaacgaagttattgataaaatgcgcgctgttcaggagcaagtggcttctgaaaaagcagagcttgctaaactgaaagatctgccagctattacgctggacggtcaccaggtagaagtatgcgctaacattggtacggttcgtgacgttgaaggtgcagagcgtaacggcgctgaaggcgttggtctgtatcgtactgagttcctgttcatggaccgcgacgcactgcccactgaagaagaacagtttgctgcttacaaagcagtggctgaagcgtgtggctcgcaagcggttatcgttcgtaccatggacatcggcggcgacaaagagctgccatacatgaacttcccgaaagaagagaacccgttcctcggctggcgcgctatccgtatcgcgatggatcgtagagagatcctgcgcgatcagctccgcgctatcctgcgtgcctcggctttcggtaaattgcgcattatgttcccgatgatcatctctgttgaagaagtgcgtgcactgcgcaaagagatcgaaatctacaaacaggaactgcgcgacgaaggtaaagcgtttgacgagtcaattgaaatcggcgtaatggtggaaacaccggctgccgcaacaattgcacgtcatttagccaaagaagttgatttctttagtatcggcaccaatgatttaacgcagtacactctggcagttgaccgtggtaatgatatgatttcacacctttaccagccaatgtcaccgtccgtgctgaacttgatcaagcaagttattgatgcttctcatgctgaaggcaaatggactggcatgtgtggtgagcttgctggcgatgaacgtgctacacttctgttgctggggatgggtctggacgaattctctatgagcgccatttctatcccgcgcattaagaagattatccgtaacacgaacttcgaagatgcgaaggtgttagcagagcaggctcttgctcaaccgacaacggacgagttaatgacgctggttaacaagttcattgaagaaaaaacaatctgctaatccacgagatgcggcccaatttactgcttaggagaagatcatgggtttgttcgataaactgaaatctctggtttccgacgacaagaaggataccggaactattgagatcattgctccgctctctggcgagatcgtcaatatcgaagacgtgccggatgtcgtttttgcggaaaaaatcgttggtgatggtattgctatcaaaccaacgggtaacaaaatggtcgcgccagtagacggcaccattggtaaaatctttgaaaccaaccacgcattctctatcgaatctgatagcggcgttgaactgttcgtccacttcggtatcgacaccgttgaactgaaaggcgaaggcttcaagcgtattgctgaagaaggtcagcgcgtgaaagttggcgatactgtcattgaatttgatctgccgctgctggaagagaaagccaagtctaccctgactccggttgttatctccaacatggacgaaatcaaagaactgatcaaactgtccggtagcgtaaccgtgggtgaaaccccggttatccgcatcaagaagtaattcttgccgcagtgaaaaatggcgcccatcggcgccatttttttatgcttccgccagcggcggcaaaatcaattcatcgctctcatgctgctgggtgtagcgcatcacttccagtacgcgcaaccccgctcggtgcactgcatcggttaacgccttccctttcagcaagccactgatgagctgagcacaaaacaggtcgccagtccctttcaggtcggtttttacccgtgaatgggaaatgacattcacgctgtcggcagtgaccaccacaacctgcatctcctgattttcttcattaccggaggcgctggtaaccaccacccattttaatgtgtctgaaagcagactttttgcggcagcaatggcactgtcgagatcgcggcaatttttaccggtcaggatttccaactcaaagatattgggggtaattccctgcgccagcggcagtaaatattgtcgatacgcttcgggaaggtcaggtttgacataaattccgctatcaatatcgccaatcaccggatcgaccatgatcaataggtcaggatggtctttgcgtagcgcagtcagccactcggcaaggattttgatttgcgatgccgttcccatatagcccgtggttacagcacgaagttggcgcagcgcatcacgctcctgaagcgcacgcaaatagccgctaaaccattcgtccggaatcgcaccaccgtagaaagtgtcataatgcggcgtattgctcagcaataccgtcggcacggcaaagacattcaggccgttctgtttgatagcaggcacggcaatgctgttgcccacgctgccgtaaaccacctgcgactgcacggcgacgatatccgcctgcagtgccctactcttatcgttaaacaacaacaaactactcatttaattttttctccttgccgatgatcctcatcgtaatccaaccgaaactttacctgattctggcagtcaaatcggctatcacaaaacaaggataaggtaattcaatgaagaaaatcatttgtctggtcattacactactaatgacactccccgtttacgcgaagttaactgcccatgaagaagcccgcatcaacgccatgctggagggattagcacagaaaaaggatttgatatttgtgcgcaacggtgatgaacatacctgctatgaagcggtttctcatctgcgtctgaagctcggcaatacccgtaaccgcattgacactgccgagcagtttattgataaggttgcttcgtcgtcatcgattactgggaagccgtatattgtgaagatccccggtaagagcgatgagaacgcacagccttttttacatgcgttaattgcgcagacggataaaacggtgcctgcggaaggaaattaatccgctttgggaaggcatttacaggaggtaacatgaaaaaacgctttatttatcacgatgaaaaatcgaataaattttggtggatagattacgaaggggatagtttagctgtcaactatggcaaggtaggtagtattggtaaattccagacaaaagagttcgataatgaagaacagtgtctgaaagaagccagtaaattgattgccgcaaaaatgaagaaaggctatcaagaagatccaaagtttaacttcatggatcgctactattttgatgatgaagaaattgggttacatgttaaaacgtcacacccaaacttccagtgccattttactgatccactttatatgtgttgctgggatgaagaatctccttttggcagcgatgaaggtgctgatgctctaaacgttcttgaaaatagcctccgtaaagagccggatctggactgtgctgatttccctcaaatgttaattgaaactatgtggggtatgaaatacatcgctatggacagtattcttgaagaggatgttcgtgcgcaattactagtcgatgaaatgagcactatccagagcaatatgattacctacgcaactgcattcggtcagattaaagtcatgggtaaaatctcccataaacttaaaaagatgggactcaatgcactagcgcgtcatcagcttaccgcaaaaattcttcaatggggtgacggtcaggactcaccaatacttcaaaaaatgattgatgaccttacggcgtttcctcacgaaaattaaatactgcatttgtcggcagcaacaactgttaaaaaagtgcgctttgtttatgccggatgcggcgtaaacgccttatccggcctacaaaatcgtgctaattcaatatattgcagaaaccttgtaggcctgataagcgtagcgcatcaggcagttttgcgtttgtcatcagtctccgatgctattaatccttaaatccccgccccctggctaaaatgctcttccccaaacaccccggtagaaaggtagcgatcgccacgatcgcagatgatcgccaccaccaccgcgtcagggttagcttttgccacccgcagtgctccggcaaccgcgccgccggagctgacgccacagaatattccttcccgcaccgccagttcgcgcatggtgttttccgcatcgcgctgatgaatatccagcacctcatccaccagagaagcgttgaaaatccccggcagatattccgtaggccagcggcgaatgccgggaatgctgctgccctcttccggttgcaggccgacaatggtcaccggtttggattgttcgcgcataaagcgtgagacgccggtgatagtgccggtcgtccccatgctggagacaaaatgagtgatgcgcccgccggtttgctgccagatttccggcccagtggtggtgtaatgcgcataagggttatcgggattattgaactgatcgagcagctttccttcgccacgattcgccatctccagcgccagatcgcgcgcaccttccatgccctgctctttggtgacaagaatcagttccgcaccataagcacgcatcgccgcacggcgttcctggctcatgttgtcgggcatcagcaatttcatgcgatagcctttcagcgcggcaatcattgccagcgcaatgccggtgttaccactggtggcttcgattaagacatcacccggtttaatttccccgcgcttttccgcctcgacgatcatcgaaagtgccgcacgatctttcaccgaacctgccgggttattgccttccagttttaaccacacttcactgccgttatccggccccattcgctgcaacttcaccagaggcgtattgcctattgtttgttctaatgtactcacgatctctatccatacgtggtgttgcctgatgcgacgcttgcgcgtcttatcaggtctacaggttacaaaccttgccattaaaaagcccggatcgcgggaagcgcctccgggcgtttaacattcactcaacctatcaggcgctttgtgcgagagcaagttcctcatcgcgggtttcgatacgctcgtcgccgttatacagccgcgcatgttgcagaccaacgaataaacgctcgccacgctgcggggcatcgtcgccatgcatcacgaccgtcagcggttcgttgtaccaccccagcggctgcaccactaattgggtgtagtgacctttcgggctggcttccagtacctgtaccggcagcggcgaatcgaggctggtacggcggctgatatccacttcccaagggcgcaggaagagatccaccggcccctgatacgcaggtgtgtagcccagcggccagcgatgcgcgccaacatggaactgcccgccgcgaatggttccctgcaggcggttcacttcgcccataaattcgagcacaaaacgggtcgccggttcgcgccatacctgatccggcgcgtcagcctgttcaatattgccctggctcatcacaactacacgatcagctacttcggtcgcttcttcctgatcgtgggtcacaaaaacgctggtgaattttagttcttcatggagttgacgcagccagcgacgcagctctttacgcacctgcgcatccagcgcgccaaacggttcatcaagcagcagaatttgcggttccacagccagcgcgcgcgccagcgccacgcgctgtttctggccgccggaaagctgcgccggataacgatccgccagatgggcaagctggaccatttccagcaattttgtcactttcgctttgatggctgcggcattcgggcgctcgcgacgcggcagcaccgtcaggccaaaagcgatattgtcgaacaccgtcatatggcggaacagcgcgtaatgctggaacacgaaaccgactttacgatcacgtgcgtgcaggcggctcacgtcggtgccgtggaagcgaatatgcccgctggtttgatgctccagcccggcgataatgcgcagcagcgtggttttcccggaaccggacggccccagcaacgcgaccatctgacctgaaggaatatccagtgagatatcgttcagcacctgggtgcgaccaaacgacttcttaatattggcaatctcaatgctcatgatgttcctcctgctgtgcgcgtttttcctgattctccaggcgccactgcaacatactttttaaaaacagggtgataatcgccatcagcgttaacagcgccgcagcggtaaaggagccgacggtgttgtagtcctgctccagcaattcaatctgtaacggcagcgacagggtttcgccgcgaatcgagccggaaaccaccgacaccgcgccaaactcgccaattgcgcgggcgttggtcaacaccacgccataaagcagcgcccagcggatgttcggtaatgtgacgcgacggaacatctgccagccggacgcgccaagcaaaatcgccgcttcgtcttcctggctgccctggcttaacatcaccggcaccagttcgcgcaccacaaacggacacgtcacgaagatggtgaccagcaccattcccggccaggagaacataatttgcaggttatgctcgtcgagccaaccgccgagcgggccgttagagccgtagaacagcaaatacaccagaccggcaaccaccggcgatacggcaaacggaatgtccagtagcgtcagcagtaactggcgtccagggaagttaaagcgcgtcaccagccaggccagcagaatgccgaacaccaggtttaccggtacggcaatcagcgcgatcatcaccgtcagccagatggcgtgcagcatgtccggatcggccagattctgtaaaaccggcatcagccccttgctgaatgcctgcacgaagatgtaaatcatcggcaccagcaggatgaacgccgaaaccagcatcccgatgccaatcagaaaccatttgccccagttaatcgggcgcgcgtcataacgcttcaattgggtaacttccgccattaatgacctaccacacgccgaccaaagcgactttgcagagtgttaattgagaacagcagcagcagagatgccgcgaggatcaccgaagcaatcgcgctcgctgccgggtaatcaaactcctgtaagcgcacaaaaatcatcagcgacgtcacttccgtcttccacgcgatatttccggcgataaaaatcaccgcgccaaattcaccaagactacgggtaaacgacagcgccacgcccgccaccagcgccggagaaagctccggcagcaccactttgcagaaactctgccagcgcgttgcaccaagcgtttccgccgcttcttcatattccgggcctaactcttccagcaccggctgcacggtacgcaccacaaacggaatgctggtaaaggccatagccaccgcaatccccagccatgtataggtgactttgatatcaaacttcgccagccattcaccgtaaaaaccgtttacggaaaagagcgaggccagcgttaaaccggcgacagccgttggcagcgcaaagggtaaatccatcagcgcatcaagcagcgtgcggcctgggaagcgatagcgggttaggatccacgccatcagcagaccgaaaacgccgttaaaaatcgatgccacaaacgccgacagcagcgttactttgtaggccgcgaccacctgcgggttggtgatcacctcccagtactgcgcccagctcatctgggccagttgcatcaccagcgcggagagcggcagcagcaaaatcaggcacacaaacagcagactggtgccgaggcttaaggtaaagcccggcagcacgcgtctggaggagacagcaaacatcagttacgccccgccgctaacagcttgtctaactcgccgccgctggtgaagtgggttttcatcacttccggccaggagccaaatttgtcttccacgcggaacagctcggtctgcgggaatttgtctttcagtttgtccatcacctccgggttattcacgcggtagtaatagtcggtgatgatggtttgcgcctgcgggctatagagccagttcagataggctttggcggctttttccgtaccgttggcctgcacgtttttatcaacccacgccaccgggaattccgccagaatgttggttttcggaatcaccacttcaaagccctgcgcttcatactgtttacggatgttgttcacttccgattcgaagctaatcagcacatcgcccaggccgcgctcggcaaaagtggtggtcgcgccacgaccgccagtatcgaacacttcaacgtttttcaggaactgggtcataaactgttcggttttgcctttgtcaccaccgtcagctttatccgctgcgccccatgccgccagataggtataacgcgcgttacccgacgttttcgggttcgggaaaatcagcttcacgtcggagcgcaccaggtcgttccaatcgtggatattcttcgggttacccttacgcaccaggaagcccatggtggagtagaacggcgagctattattcggcaggcgcgactgccagtcggccgggatcagcttgcctttatcgtgcaggatttgtacgtcggtcacctggttataagtgacaacgtcggcttttaagccctgtaaaatcgccagcgcctgttttgatgacccggcatgagattgttttatcgtcagtttgtcgccgccgttatcttttgcccattgttgctcaaacggcggattcagggcggcaaacagctcgcgggagacgtcataagaactgttcagcagttccgttgcctgtacatggcccgccagcagcagagaagcgaccagcgcgagtgagttctttttcagtaagttaacggccattgcgcacccttataaatttaatgactttctaatagccatcatatttataacggacgtgaaaggagtaacggttttatataccgtttggtgatttggaagttgaaaagggaataagaacttggttcaacaggcgtaattgttgcagtcagtttggacacgaacagcgcggagaaaccggagcgtacacatagtacgtgaggatttcgagcactgcccggggccaaaatgacaaataaaatagcctggtgaacttagttcaagacgaaatcctccccacaaatgcagggaggaaacagaggtgaatcagataccgacgctaaccgtctccggcagtgtgctgccgccatcaatcacattctgtgtaccggttaaatagctggattcatccgatgcgaggaaggccgccagttcgccgacttccagcggatcggcgaggcgacgcatcgggattgctttcgccatttcagtcagcaccgactctggatcttccgggttcgactggcgggcaatgctttccgccattggtgtgcgcacgtatcccgggcaaatggcgttaacgcgaataccagactgcgcgtactccaccgccagcgattttgtcaggccaacaatcgccgctttcgttaaggcgtacgccgtttcgccaggatcggccaccatatcaccagtgactgaagacatcatcacaatgcgaccatctttgcgggcaatcatctccggcagcaccgccttcgtgacgttccatacgcctttaatattgatgtcaatatggaaatcgcgatcgtcatcgctcatatcgaggaaactgcccagacgacaaacgcctgcgttattcaccaggatatcaatgcgcccttctttttccttcgcgcgtttgatagctgcggctaccgacgccgggtcacgcacatcggcgacaaccgccgtacagcgatgaccacgaccacacagttcgtccgccagcttttcgatctcaggggagatatccagcaagattaggttcgcgccatgacgtgcaaaagttctggcaattccttcgccaattccctgcaatgcgcccgtaatcagtgctgtcttgcccgtgagtttacccattttaatgctctccttgttaatacagagcgttacactccattccctctgaaaatacaggataaacaaaatattgctgcggatcagctcactaattcaggaaaatctcaatccagtcgctgctttatgcatcatttcaggcgttgtgttagctcactgctgcgctgaatcattttcaatgactccacatcattgagttgcacaaggccaacaaacagtaaatcggtaacagaattttgcgccgtgcgggtagacatcgacgagctacgccattcggtttctccggaaacggtatcgagggtgaaatgcgccagccgccgcagcggagagtcagtcagagaagtaatggcaatcaccgttgccccctgctttcgtgccgcttctgcgcacaagacaatctcttttttactgccgctgtaagagatagcgatttgtacatcgccttttttcaacgcctgagaaacggtggcttgtacgtgcgtgtcggcttcgcaggccacgcgatagccaattttcatcagtttgaacgacagatcgcgccccaccagcgccgatccgcccaggcccgttatctggataaacggtgctttactgatgacctcaatgattttttgcagccgcgcgtaatcgagcaacgcgcaggtttgctccagcgccagctctttttcgcgattcagtttgcgcgcgatcacttccagcgaatcatcactggtaatcgaactgtgcaggtgcagtgccgtggcattcgttttctcccggctggcactgtattcgcctattaacgccatacgcaattcagtaaatccttgcgcgccgagtttttgggcaaatttcactatgctcgactggctaatgccgagctgtttcgccatctgccgtgaagaaacggattgcagctcactcacgttggcctgcagaaagtcagcgattttttgctcgttttcggtgaattcactccccgcattgcttattttcgtcaggtacaacatcttccactctcctgggctggcagcataaattccgcttaagttcttatgacgctcttcacactctgcgagtgtagactcaatgattcctttaagcctgtcaattcgggatatatgattccatacatctgcaattatttgatcgtaaatagtaaggtcaccaccgatgcaatttgaaaagatgattactgaaggctcgaacaccgcctcggctgaaattgaccgcgtatcgacgctggaaatgtgccggattatcaacgatgaagataaaaccgtaccgcttgccgttgagcgcgtactgccggatatcgccgcggcgatcgatgttatccacgcccaggtaagcggcggcgggcgtctgatttacctcggtgcgggaacatccggtcgtctggggattctggatgccagcgaatgtccgcccacctacggcgtgaaaccgggtctggtggttggtttgattgctggcggcgaatatgccattcagcacgcggtggaaggcgcggaagatagccgggaaggcggtgttaatgatctgaaaaatattaatttaacggcacaggatgtggtggttggcattgctgccagcggtcgcacgccgtatgtgattgccggactggaatacgcacgccagctcggctgccgcacagtgggaatttcctgtaatccggggagcgccgtttcaaccaccgctgagtttgccattacaccgattgtaggtgccgaagttgttaccggttcttcgcggatgaaagcaggtacagcgcagaaactggtgctcaatatgctttccaccgggctgatgattaaatccggcaaagtgttcggcaacctgatggtcgatgtggtcgccaccaacgaaaaactgcatgtgcgacaggtcaatattgttaaaaacgccaccggatgtagcgcagagcaagcggaagcggcgttaattgcttgcgagcgcaactgtaaaacggccattgtgatggtgctgaaaaatctcgatgccgcagaagctaaaaaacgcctggatcaacacggcggctttattcgtcaggttttagacaaggaataacccatggccaaagagatcagcagtgaacttctgaacaccattcttacccgtgtcggcggaccgggaaatatcgccagttgtggtaactgtatgacgcgcctgcgtctgggtgtacatgacagttcactggttgatcccaatatcaaaacgctggaaggcgtgaagggcgtcattttgaccagcgaccaggtgcaggtcgtttttgggcctggtaaagcgcatcgtgccgcaaaagcgatgagcgagctgctgggagaagcaccggtacaggatgccgcagaaatcgccgcccagaacaaacgtcagttaaaagccaaacaaacctccggcgtgcaacaatttctcgccaaattcgccaccatcttcacgccgctgatccccggttttattgccgccggtctgctgctggggatagcgacgttaattgccacggtgatgcacgttccggcagatgctcagggaacactacccgatgcgctgaattttatgaaggtgttcagcaaaggtttgttcactttcctggtgattctggtgggctataacgccgcccaggcatttggcggcacgggcgtaaatggcgcaattatcgccgcgctctttttgctcggttataaccccgcagcgaccaccggttactacgccggttttcacgatttctttggtctgcccatcgatccgcgcggcaatattatcggcgtgctgattgccgcgtgggcctgcgcccgcattgaaggcatggtgcgccgctttatgccggacgatctcgacatgctgctgacctcgttaatcaccctgctgatcaccgctacgcttgcgtacctgatcattatgccgctgggtggctggttattcgaaggtatgtcatggctgtttatgcacctgaacagtaatccgttcggttgtgcggttttagccgggctgttcctgatcgccgtggtatttggcgtgcatcagggctttattcctgtttacctcgcgttaatggacagccagggattcaacagcttatttcccatcctttcaatggcaggcgcgggccaggtgggcgcggcgctggcactctactggcgggcgcaaccgcacagtgcgctacgcagtcaggtacgcggggcgattattcccggcctgctgggcgttggtgaaccgctgatttacggtgtcaccctgccccgcatgaagccgtttgttaccgcctgtttaggcggcgcggcgggcggtttgtttatcggcctgatagcctggtggggtctgccgatgggcttaaacagcgcctttgggccgtctggtctggtagcgctgccgctgatgacttccgcacaaggcatccttccggccatggcggtttatgctggcgggattctggtggcatgggtttgcgggtttattttcaccacgctctttggctgccgtaacgtcaatctggactgatatcatgaaacggacaatgctctatctttctctgctggctgttagttgtagcgtcagcgccgcaaaataccctgttctgacagaaagctcgccagagaaagcagggtttaacgtcgaacggcttaaccagatggatcgctggattagccagcaagttgatgtcggttatcccagcgtaaacctgctgatcattaaagataatcagattgtgtatcgcaaagcctggggagcggcgaaaaagtacgatggcagcgtgttgatggaacagcctgtcaaagccaccaccgggacgctgtatgacctggcctcaaacaccaaaatgtacgccacgaacttcgccctgcaaaagctgatgagcgaaggcaaactgcatcctgacgatcggattgcgaaatatattccggggtttgccgatagtccaaatgacaccattaaaggcaaaaacaccctgcggatttctgacctgctgcatcacagcggcggtttcccggcagatccgcaatacccgaataaagcggtcgcgggcgcgttatattcccaggataaaggccagacgctggagatgatcaagcgcacgccgctggaatatcagcccggcagcaaacatatctacagcgatgtcgattatatgctgcttggatttatcgtcgagtcggttaccggtcagccgcttgaccgctatgttgaagagtcgatttatcgcccgctcggcctgacacatacggtatttaacccgctgctgaaaggctttaaaccgcaacaaattgccgccacggaattgaacggcaatacccgcgatggcgtgatccatttcccgaatatccgcacctccactctctggggtcaggtgcacgatgaaaaagccttttattcgatgggcggcgtttccgggcacgcaggtttgttttccaataccggcgatattgcggtgttaatgcaaacgatgctgaacggcgggggctatggtgatgtgcagctgttcaatgcggaaacggtgaagatgttcaccaccagctctaaggaagatgccacttttggcctcggctggcgcgtgaatggtaatgccaccatgacgccgacgtttggcacgctggcaagcccgcaaacctacggtcacactggctggaccggaacggtgaccgttatcgatccggtgaatcatatgacgattgtgatgttaagcaacaagccacattcgccggttgccgatccgcaaaagaatcccaatatgttcgaaagcggtcagttgccgattgcaacttatggttgggtagttgatcaggtgtatgcggcgttaaagcagaagtaataaaaaggccagtcagtaatgttactggctggtctgagagtgctgacaaacgcaaaactgcctgatgcgctacgcttatcaggcctacgtggagcccacaatatattgaattagcacgatttcgtaggccggataaggcgttcacgccgcatccggcgtgtacaacgcgcacttggtcaacaatctgaggccagtcagtaatgttactgcctggcctttaatcaatgaatcagaaacgcttacagcgccatcaacttgtccagcgacggtgcgaaataatagccgccggttaccggtttggtgaaacgcaacatcgcatcacgcttaccatcggtatcgccaaacatgctcagcagttgctgctcaatgttatgcagacgcgcgcagtaggcgcagaagtacagaccgtgagtgccactggcagtgccgtacggcaggctctggcgaacaatcttcagccctttgccatcttctttcagatcaacgcgggtgaggtgagaggtttccggacgttcgtcgccgtcgatctcttcgttggcctctttggtgcgcccgatcaccatctcctgatcgtgaacgctcatccggttgagctgcttcaggttgtgttcccaacgctggacaaacacatagctgccgcccgcatccacgccgtctttgataaccgccacttcgcgacgcgtctcttcacccgccgggttttccgtaccgtcaacaaagccgctcaggtcacgctcttcaacccaacggaagccgtggatctcttctttcacttcaatgcagtcaccaaaggcttccatcgccgcctgggcgacagagaagtttacgtcgtgacgcagagaaagaatgtggatcaacacatcgaactgggtcgtcggcgcaaggcctttaccgtagcccggaaaatctttcagctcttctgccccaacgccgccgctcagagcgcgccaggtgttgttaccaaaggcaaccaccgcaccaagatgcgcgtccgggaatttcgcttcaaaagttgccagtttgtcggcaaatgttttactggccgcacgcagggcgtcaacttcccctttcacgttggcttcgatccaaatcgccgcgcggcaatgttctggcaaaatgccactctgaacctgagacattgttcctcctgaaaataataatgccacgcaatccgtggcattgttgagcgctattttacgtgttttttcgcggcggcggtttgttcagacgcaaattaacgccgccagataattttactgactttccagtttttcagggtatcgtccgaaggcattaacccttcaggaccacgccattccccgctgaactggtagctaatatgttgactgccttcggctttacattcgacggcacgattatcatcaccatcagctttttggcaattgccaaatgctttgctgtaaaggtcgctaaacggtgtaccgattttaacaccggtgtcagcaggaatatcgctatccagcacgtcaatgcgactgatcgtgccttgatcgccgttaatcaccatcgccacgttgtcgcccttcatcacttcaaaaaagcgcaccacgttgccgttcgcggttttcattccgctgcgcaggcgataatcgccatcaagcgcatcggcaatggcttgttcttgcagtggtgtggacgccgttaattcacccacgccctgctcgctcactttggtggacgacccaaaccagttccacgggttagcggcagaccagttaactgacgacatcgtggaacagccggtcagcatcaatggcatagcgcataacattaaacgcagcgatttcatgtcacttcctttggttattcaataacgttgcttggagtgcaaattcaccaaaaagtgccgttattcttttacttcataaaaacaagcgcgtaaacgtcgattggtcagcagccagattaacgccacaatatccgccactaccagcgccagaccgataccgctaacggattcaccgttcagccacagccacggttgccagcaaagtaaaaccacctgcgccaacagcaacagaaaatagagtacacgccaggtgcgaggaaacgtagcccgccgaccgctcaacaaaaacgccagcaccgccggaatgccaggaatcagccccagccagaaattatcgtgatcgggataaaacagatttagcagcgcagtaccctgctcgcgcgacgcaccggcaatgacaaacagcacccaggttcgcgcctgaagcaatagcacaagccagaagagcaagggtaaacgcaggcgaccgtgcgcatcataatggacaggatgaaactcagtactcttcatcttcaatcaaacgcttacccagactcagcacgtcggcgtgttcatatcccaggcgttcatacattccgagcaccatgtcgttatcttccggcacattgatctgaattttcgggcagccacgagcaatcagctttttctccagccgattaagcaacgcattggcaatcccacgcccacgaaactctggatgcacgccaagataataagcagacccgcgatgcccgtcataaccgcccatcaccgttccgaccacgtcaccgtttacctcagcgaccaaaaacaaactgacgtcatggttcatcttacgctcgatgtccatttccggatcgttccacggacgcagcaagtcgcaacgctcccaaagggtgatgacctcttcgaaatcttcctggcgaaatacgcgtatctccatggtattcgttacctttttgcgggttaaaaggctgattatggcgtgaacggtcgaattagccaatatctgacgaaaatcggttgaaaaagtggcataatggggagttgtcaactattgaaatgaaaagtaaaacaattctcaacagcaaaccgtcgtaacggattacgcgatacgatataacatctggaactttattattacaactcaggccgtatgagcacttttaaaccactaaaaacactcacttcgcgccgccaggtgctgaaagccggtttggctgccctgacgttgtcaggaatgtcgcaagccatcgccaaagacgaacttttaaaaaccagcaacggacacagcaagccgaaagccaaaaaatctggcggcaaacgtgtcgttgttctcgatccaggtcacggcggaattgataccggagcgatcggacgcaacggttcgaaagaaaaacatgtggtgctggcgattgctaaaaacgtccgttccattttgcgtaatcatgggattgatgcgcgtttaacgcgttctggcgatacgtttatcccactttacgatcgcgttgaaatcgcccataaacatggcgcagatctgtttatgtcaattcatgccgatggctttaccaacccgaaagctgccggtgcttcggtatttgccctctctaaccgtggggcaagtagcgcaatggcgaaatacctgtctgaacgcgaaaaccgcgccgatgaagttgccggtaaaaaggcgactgacaaggatcacctattgcaacaagtgctgtttgatctggtgcaaacagataccattaaaaatagtctgacgctcggctcgcatattctgaagaagattaagccggtgcataaactgcacagccgcaacaccgaacaagcggcatttgtggtgttgaaatcaccgtcggttccttcggtgctggtggaaacctcgtttatcaccaacccggaagaagaacggctgttaggcacggcggcgtttcgtcagaaaatcgccacagcgattgctgaaggcgtgatcagttatttccactggttcgacaaccagaaagcacattcgaaaaagcgataagttatgaaacccgacgcacaccaggttaaacagtttctgctcaaccttcaggatacgatttgtcagcagctgaccgccgtcgatggcgcagaatttgtcgaagatagttggcagcgcgaagctggcggcggcgggcgtagtcgggtgttgcgtaatggtggtgttttcgaacaggcaggcgtcaacttttcgcatgtccacggtgaggcgatgcctgcttccgccaccgctcatcgcccggaacttgccgggcgcagtttcgaggcgatgggcgtttcactggtagtgcatccgcataacccgtatgttcccaccagccacgcgaatgtgcggttttttattgccgaaaaaccgggtgccgatcccgtctggtggtttggcggtggcttcgacttaaccccattctatggttttgaagaagatgctattcactggcatcgcaccgcccgtgacctgtgcctgccatttggcgaagacgtttatccccgttacaaaaagtggtgcgacgaatacttctacctcaaacatcgcaacgaacagcgcggtattggcgggctgttctttgatgacctgaacacgccagatttcgaccgctgttttgcctttatgcaggcggtaggcaaaggctacaccgacgcttatttaccaattgtcgagcgacggaaagcgatggcctacggcgagcgcgagcgcaatttccagttatatcgtcgcggtcgttatgtcgagttcaatctggtctgggatcgcggcacgctgtttggcctgcaaactggcgggcgcaccgagtctatcctgatgtcaatgccgccactggtacgctgggaatatgattatcagccaaaagatggcagcccagaagcggcgttaagtgagtttattaaggtcagggattgggtgtaactccctcacccccactcccgcatccgctgatgcagcgtcagtgacggcttctcggaaaacagctgctggtaatccgtggcaaattgccccagatgccagaatccccactgcatggcggcgtcttttaccgtcatactttgcgaccacggacttatcagttcgcggcgtacggcgttcaggcgaatgcgtttcagccacgcgttcgggccaatgcctaaaatagcgtgaaacgcgttttgtagcgtgcggcggctgacatgcagttgattacacaaatccagcaccgtcaccggttcggacatgttttccagcacatattcacgggcgcgggaaagcaatcgacggtaactctgatgactgatgctttccgccgtcaccattggttgcgcttcttccagcatggcccccatcgccattagcaaattatcccccagcacttttcgcactgcaggctgatggagattttccggattctcgcaaaacgtcgccagcgcctgttggacaaagccccacagcgcggctttatgctgctctttcacttccagcgccgactggttacgcaacatatgtaatacccgatccgggttatgcaaaaagttagcctgccgggtgatgacatcttcagaaagcaccacgcccaggatcgtgtaatcatccggcgtgctcagttcaaattcagtgccaccagggcgggtggcgatttccgcgcttcccagacattgcgaaccgataaatccctgctcaccgcgcgtcgccggaatgccaaaccagaacgagttcggccagaccaggcacgactgacgcagcgccagaccggtgtattcacgaaaaacctgaatatcatcgagtagaatttccgtaaattcaccatgaaacttgcccggatgcagctgatcgtaaatctgctgccaggcggtaatcgttaaagcatgttcatagacatccgttgtctgtcgttgatgaacattatccacttcgaccttcggcgtgagcttcaggttttcgggtaagggttcatgataaagatggtgcaaattggctgtacgggtctttttcatgatgttaatgccgggtgttgtaggacacccggcacctccgacaggttaatggggcttgagacgataacgactactgcgtttacgtaacgtcccggcagaaaagagctgttcgagcgcatttctggctttttccagcggccagccaaagtgggcagccacttctcctgccgtcattccctgacgtactgatgttaacagcgccaacaactcgtcagcagattccgcgacgataactggcgcgtcgggttcccttacgggttgcttcggctggcggttaaagccagtaaccagccactgggtgtcatcgtctggccgaccgatctccttgcggctgatgacacgcccggtacgcatcgcggcagcacaacctgcgtccagcgccgcacgacacgccgccagatcgccttccaccaccagcgttaagcgaccagggtcaagcacttcgtgactgagcagacgaacgttagctgctttgagcatggcatccgctgcatctatcgcggcgaccatgccgtccacttccagcaatcccagtgcattgatcatcggcaacctccgttacgcacgctggattggattacgcgcgatttccagcactgcatcggtaaaggcgttacaggctgctttacacgctgcctggctaccggttaaaaatgctgccgagtagttggtttcagacggtggcgggacataggtcgccagctgtacgtcggcagacttcagggctgcatcaatgccataggtcgcttccagcggcggtgccaccagatacgccatcggatcgccaagcgtgatcccggcggttgatgagagataagaaccggtacgcgaaactacatgtgccaggaatgccgtatcttgcgcgtcattagcccactggaaagctgcgccattttcaatatgcgcaatcatcgcatccagacctgcacgcacttccgccgggtttggcccaccaagcataatcagcacttcaccggcagtcggtgacgggccgtgtgcagcgcccgcatatagcgagcggccatacaccacttccaccatcgcctgcttggtcgcttcatcagcggcaatgtaggtgacgtcatcggagtcggcagaaatcagaccgaggctacgaatatgcggcggcaatttcagttcacgcgcaaaatcggcgttaacggaggcaatcacccgcatagcggtgacagacggtcgaatcaaatctaaagctggcatgatgcctccttatcgggtcatgttgatgccggatgctttctgctccagcatacgtttcgccaaatccacaatgacggctgcggcttcaaccggcggcgtgccgccctggtgaatgttagagatacaggtgcgatcggcctcaacggtggtcgccatacgcggcgagtaaacggcgtagcaggagaggctttctgactgacccaaccccggacgttcgcccaccagcaggatcactactttcgcgccgaggatctcaccgatctgatcttcaatcttcacgcgaccataacgaacaaagaatggtgtaccgactttcagcccggcctgtttcaggcccgccatcagcggtggcaggatctcttcgtagttcacggtgatcgcatcagttgacaggccatcagaaataacgacctgtacgtccggattggcaacacactgcgctttcagcgcttcaacagcttctgcacacaggcggcggcccatatccgggcgagtcaggtagagatttttgtcgctaatttcagagcgtacttccagcaagccctgcgctttcacccactcttccggcacttctttcagtacggtatctttcgaacgagagtgatcggccaggaaacgcagcagcgcctgcgtacgtggacgcggaccggcacgaccggtacaaacgcgggccacggtgctgcggcgcagttctgttaatacgtctgcgcgatgcggattttcaacaccaatccacgcttttgcttcagcggaacctaaatccagcgcacagctttccgaggtcaccggtgccgcacagttggtggtggcgcactttgcttctgacggcgcgggggccgcttgtcccattgacgccatcacgctgcgtacaatttcttcaatctgtttttgatccatgatatgttatctccgcgtcatcagaagaacagtgacggatcgcccgcccgtttggtcaggcgaccgtttgccataatgcccatgctttccagccagcgttcaaactccggtgacgggcgcaggttgagtaactgacgcacagtggcggtatcgtggaatgcggtggtctggtagttgagcatgatgtcatcacccagcggcatccccatgatgtagttgcagcctgcggtggcgagcaggatcatcaggttttcgttgaggttctggtcagcgtcagcgtggttggtataacagcagtcacagcccatagagatgccgctcagcttgcccataaagtgatcttctaagccagcacggataatctggcggtcgttgtagagatactccggcccaataaagccgaccacggtgttgacgataaacggatcgtaatgacgcgccagcccgtagttacgtgcttccatcgttacctggtctgcgccgaagttagcgccagcggatagcgcagagccttgtccggtttcgaagtagaggcagttttccccggcgatacggttgaactccgcgcccactgcgcgcgcttcgtcgagcatcgccagctccacgccaaactctttcagccctttttcgctgccacagatactctggaaaatcagcccgcccggtgcgccacgacggatcgcttcgatctgggtggtgacgtgcgccagtacacagccctgagttgggatgttgaatttgtcgatcacgccatagatggtatccaacacgcggcttaagttttccacgtcgtcagtcaccgggttaacgccgatcaccgcatcgcccaccccgaaggaaagcccttcgtagatttgcgcggcgatactttgcacgtcgtcacgggtgtcatttggctgcaaacgggcgctaaaggtgcccggaataccgatggtggtattggcctttttgattaccggcattttcttcgcgccgtagatcaggtccgcgttggagcaaatcttcgctaccgccgcgaccacttccgaggtcagccctttgcgggtaaaggcaatgtcgtccacgctggtttcatcgctcagcacatactcacgcagttcgctgatgctccagtttttaatctggttgtaggccgtttcgttaacatcgtcctgaatcagccgcgtcacgcagtcatcttcataggcaatcaccggattattgcggatgtccgctacggtcatttccgacaacacctgctttgccgccacgcgctcctgtgagcttgccgctgcgacgcccgccagcacatcccccgaacgcagttcgttggctttagccagcacctcttttacatccttaaactgatatacattgccgaacaatgtggtctttagtttcataagtcgttccctcaggaaggaaatgcgagtgatttcaccgtcaccggcacaaccgatccgccaaaaagaggcgtaccaatgtcgatatagtcccccgcgcggacaatcacttcgtcaatgactgccaacgggagttgttgtagctgtgggcgcaacaacatgcccagagctttaccaaagtcctgcccggccaccaccagcaggggatgcggattcggaaaacgcgcgacgaaatcgaccaacgcgttgatgaccgtcagtaccgcggcgtaacgcacaggcagcgaggcgggaagcgccagcacgtacgcgtcagttttgggatcaagatccagctgaatcagcgcctgttgccaggcccccaccagatccgtttcatcaatcgggatcgccaccggcaaattgcgcagcggcagttgtacgccctcaagccagattgtgctgccagagagcgaaagggtatgcgcgcccgcgccaatcaccgtggcgcgcacggtttgcgccggaaactgtacgttcatctcacgcaggcgcggatggtcatgcagcgcagttgccagcagcgggccaatatcggcaaaacagaacgggtcggcgggctggtggcgataacattcgcccacgccgccagaaagcgtaatgatttcgggcgtaacacctgcgggcagcaaaccggtttgcatcaatgcctgcgcgagcggtgagagcgttccgtcaatcacttcgacaatcagttctgccatccgccgggtcacctgcaccagctgcgcgccggtcagcgaacgggcgtcggtgcctgcaccgaagcactcatccacaatcatctgccccggtttatgagcgtaaaccacgcgcccgtggctgtcggtttccagcaggcgaccaccgacgttgaggcaggcagtgccgctgatttttccggcatcgaacagggcgtagttcgcggtgccaccgccgatgtcgatattcagtacccgacacagccgttgttcagaaagggtttgtgccccggctccgtgaccggcgatcacggattcgaggtgcggcccggcgctggcaacgacaaaatcgcccagcgactgagagagcgccatcaccgccgggcgagcattgcgggttttcgcgctttcaccggtgatgatgatggcaccagaatcaacgctttccggctcaatacccgcagcatgatattgctcgagtattaaggttttcagttccgcttcttttaaaccgccctgtttatcgacaggggtaaagaacaccggactttgccagctaatttcgcgtttaatgaattcgtagcgcggcacctgcgacaccgccgcacggttaaccagctccagccgggagaaaatcacctgggtggtggtggtgccgatatcgataccgacgctcaatagctggcgagtgttcacgattgtgcctccgcttcggttttagtcgcggtcgcgtcttcttttggcaccagcatcatcgccacgccaatcgccgttacgccgccgatcaacttgccgacaatcatcgggaagatcatggcgttcatgttggcagcggcgaagcctaagtggtcgcccagggcgaaagcagcggaaacggcgaaggcgcagttgatgactttgccgcgggtatccatctgcttcatcatgccgaacatcgggatgttgttggcaagcgttgccaccatgccggctgccgcgatgttgttcatattcagtactttaccgacgctcatcagcggtttttcaaaccagcgagtcagcagcagcaccatcggatacgcccctaacagaacgcaggagatagaaccgataacttcaatggcgcgcatcacctcaccgggtttatcgccaggggccataaagataggatccagaccggggatcagttcccagccaagcaggaatttcactaccgcagcggcaagaccgagggtgatcaatgcaacgaggaatttggcgaagatctggaagccgttgatcattttttccgggatgaatttcagccccagcgccaccagaatcgcaacaatgatcaccgggatcatgttcatcaggatcagggcgaaagtgaattccaccggctggccgttgatctgcacaccggagtacatagcaaccagaccaccagcgatacaaccaatcggaatggtcacaatgcccgccagcacgccgagcgccagataacgacggtcagaaggttcgataatgccgagcgccaccggaatggaaaacacaatcgttggccccatcatcgacccgagaattaacccagagtatagccacgcggctacgtcgccgcccgccagctctttggcgaggaagaagccgcccatatcgcacgccagcagtgttccggcgaacatcgatgggttagcgccgagcatttcgtaaaccggaataattaccggcccgagaacgtgagccagtaccggtgccagcgcggtcataccgaccatcgccaggcccagtgcgcccattgccataaagccttcttcgaactgaccgcctgatccttcgatacttttaccgaacttaccgaggaaacgagcagaaccgccgaactgcgacaggatcctgtctacggcagctatcagcataaagaacatcatgatgtacatgatgatttcgttaattcccatcgcctttactccctgttagttgttatttattggcggatgcggcgtaaacgccttatccgccctacatgtgcaatcccgtaggctggataagacgcggcaagcgtcgcatccggcaattgcaccgcgccactggcggatgcggcgtgaacgccttatccgccctacatgtgcaatcccgtaggctggataagatgcggcaagcgtcgcatccggcatttattgcgccgctgcgtacaggccgacaatctgctccaggctggcggtacgcgggttactgcgcagacaaatatcttccagcgcggcctgcgcccatgcgccgtaatgcgcagatgtcgcaccaacatcgcccagtcgtttaccaatcccaacttccgcaatcagctcacttaccgcgttaatagcgtcacgatcgtcggattttttagttcgcagtgcccgaccaatctgactaaagcgttcacgacaaaccatccggttaaattccatcaccgttggcagcaacatggcgttcgcgagaccgtgcggaatatgcagcgccgcgcccggctgatgcgccatcgcgtggcacaacccaagacccgcactggaaaacgccattcccgccatacatgaagccagcaacatgctctcgcgcgcggcaaggtcgtgaccgtagcccaccgctttcggcagcgatttgccaatcatcgcaatggcaccaatcgccagactgtcggtaaacggtgtagcgttcagggcgctgtatgcttcaatggcatgggttaacgcatcaatgccggtcatcgccgtgacatgcgacggcacaccttcggtcaatgcggcgtcgaggatcgccacatccggcatcagcgaggcatgggctaacacctgcttgcgcccgctcaccgcgtcgataatcaccgttacattggtggtttcagagccggttccggcggtagttggaatggcaatcagcggcaagcgcggttgcagaacgctggtttctgacatctctgccagcgtgctatccgggttcgtcaccagcaacgtcacggctttcgccgcatccagcaccgagccgccgccaaacgcgatcaccccatcacagcctgactcacgcaactgcgccacggctgcacacacgtcggtaatgcacggttcgcccaccggacatggccagagcgtcatggcgatacctttaacggtcaggctacgcgtcagcccggcggtcatccctgcctgatgcaaaaagctgtctgccatcacgaacagatgtttcagcccacgcgtttgcgcttgctgtccgcaactgctcaccgagcccggaccgcaaagcgtcaccggtggaacgctaaatgtttttacccgttgcagattcagggtatcgaacgcctgaaagagcgcggtctgcaattcattttgcatatagcccctccgctttctctcgcccactactggcgatcgccagcggggtcataaacaaactgtgctgcggtaaatgcacctgtaacgccgggaattgtttgcgaaacagttccgccacgcccggttgcatacaagagccgcccgccagccataaatcagtaatgccctgcccttcaatatgccgggcgacaatgtccgccattttttcgtacaccggtttcaccgcaggccaaatctcttcaccgtgaccgcgcttgtactgctccgcctcttccagcgaaatacggcgatttccggcgagagtcagagagatgtgatgtccgccggtggcttcatccgccgagtacgtcaccttgccctttttcacgatggcaatgccggtagtgccgccgccgatatccactacaccggcgttgtccagttgcagcagatccgcaactgcggttggctcatccagcacatggctcacttccagtccggcagattccagcacgttgatggaaatacgcgggtccgtacctggaggaaatgaagtcgccgcatggctaaaacgacgaccgaattgctgctcgagcgtgtcgagatggcgacgaacaatggtgacagcgccgaagaaatcccagacgatgccgtcgcgaaccacatcggcccagtcgaggcataccgccactggctgaccgtcgcggtcgacaaccatcgacaccacatcgcaggtgcccagatccacccccagccacagcggagattccgtcgcggcgggcgtctggttacacagcgttgccgccgtttgcagacgtggggtgagccattgttcgtcgtgcgccatctgttactccttaaacaatgcgaaacgcatcgactaatacacagcgacgcagacggacaaacgtacgcgcgctggttaccccttcaccggttggcgtggtgatggtcatggtggtccagccttccccgcccagccccagcccggcaatgcacggtccgttcttaacgaaaatgctggtatcaatagcattcgccatctggttcatgttttcgatgttgcgcgagtgcattgccgccgtgtggtggcaaccgccttccagtttcaccgctagcgcaatggcatccgccacgttggcgacgcgcacgacgggcaacaccggcatcatcagttcagtcacggcaaacggatgttctgcggtggtttccacaaacagcaggcgcgtttcttgcggaactttaaggccgattgccgccgcgattttgcctgcgtcgcgaccaacccagtcacggctgacggtgccttttccgcgctcgtcgatatttttcagcaacaccggttgcagctgctgcgcctgttctgcggtcagtttcaccgcgtgctggccttccatcagacgcatcagttcatcggctacgctatcaacaacaatcagtaccttttcgtcggcacaaatgatgttgttatcgaaagaagcgcctttgacgatggactgagcggcacgggcgaggtcggcggtttcatccaccactaccggcgggttgccagcgcctgcggcaatcagacgtttattggtgtgtttacgcgccgcttctactaccgcttcgccgccggttaccaccagcaggccgatacccggaaacttgaacaagcgttgcgcggtttcgatatccggatttgccacagtaaccagtaagttttccggcccacctgcggcaacaatcgcctggttgagcagcgtaatcgcccgctgggagacttttttcgccgccggatgcggggcaaaaatgacgctgttgcccgcggcaatcaggctgatggcgttgttaattacggttgccgccgggttagtggaaggcgtcaccgaagccaccacgccccagggtgcgttttcaattagggtcaggccgttgtcgccagtcagcacttgcggagagaggcactcaacgcctggtgtgccgcgcgcctgagcgacgttttttgcaaatttatcttcaacgcgccccatgccggtttcactgacggcaagttccgctaaatctctggcgtgtttttcgcctgcttcacgaatggcagcaatggctaactggcgcattgccacgctttttaacccttgctgggcgactttggctgccgcaacggcgtcatccagggacgcgaaaacgcccatctcatgaacggcggcggacggcgtgtcactgctttgcattttcagcagtaccgctttcaccacctgttcaatatcctgttgattcatgatgttctgccttatttgtggaaaattacctgaccgccagacaccacctcatcgacaatgccaatcacgcacagatcgaccggtgacgtttcgcttttatgcgcctggcgggcggaactgccactcaccagtaacacccactccccggttcccgcgccaatattgtcgatggcgacggcgcattgcccgtcaggattaccttgtggatcaatcatttccaccatcagcaatttgtcatgcgccagtccgtgatggcgtacggtacaaacaatttgtccagtgacgactgccagtttcatacccgcctccgtggcgtatttcaggtaaaagctccccctaccctccgcagaaggtaaaatgaaaaaggagagagcgtgacgcccgaatcgacgtcacacagggtgattacaggttgctgctatcgcctttcaggccgatcgggaagacttcttccaggtcgccgtgcggacgcgggataacgtgtacagataccagctcgccgatacgctgtgccgctgcggcacctgcatcggtcgcggctttacaggctgcaacatcaccacgaaccatggcagtacacaggccgccgccaatctgcttaacaccaaccagcttgacgcgcgcagctttcaccatcgcgtcagaagcctcaatcagtgcaaccaggccccgggtttcgatcattcctaatgcttccattgtgctttcctctttatcagggtccagaacgggaccgttcattcaaccagtgtttgtaaactgctttcgcggttcacttctgtctgacgcggcacagctgccaccagcgccagctcgataatttcctgcacgctacaaccacgagagagatcgtgcatcggcgcggcaagtccttgtatcagtggcccgacggcacgatatccgccgagtcgttgtgcgattttgtaaccaatatttccggcttccagcgacggaaaaaccatcacattggccttgccctgtagcgggctggcaggcgctttttgcgccgccacttccggcacgaaggcggcgtcaaactgtaactcgccatccaccaccagctttggtgcgcgctcacggacgatttctgtcgcctgctggacgttagcaacacaggggtgacgggcgctaccattgctggaaaacgacagcatcgccacgcgcggctcttctccggtgatggcgcgccaggtttcggcactggcaagcgcgatatccgccagctgcgccgccgtcggctgtggcaccacgctgcaatcggcaaagcccaacgccgggccgctgtactgtggcaacatcaggaaaatggaagagagcgttttacagcctggctgcaagccgataatgcgtaatccggcacgcagcacatttgccgtggaagagaggttgcccgcgatacagacatccgctttaccggcgctgaccattgctgcggcgaacatcagagggtcggtaagtttttccagcgcatccggcggcgttttttcgcccgcgcgggccagccagcgatgagcaaattcttcccgcattgcgaggttgccatgcggatcaatcacctgtagcccgtccatcgccacgccgtgactgagcgcaaactgacgaagttcaaacggattggcgaccagaatgggcgttgccagaccttgttgatgtaaatattgcgcggctttcagcacacgttggtctaacgcatccggaaaaaccactctggcgggcgctcgcaacgccagttcacgacaacgttcaataatcattgcgtttcccccagtcgttgttggatctgcttcaccgttagcggctgcttcgttacgctcaggatcatcatcacgtagaccgtgctcgaaaggcggttcagcgcctgcaaaatgtccgggcgtaatacttcaaagctgcgggtgataaagacctgcgccgctacggtttcggtttcccgcactttggtgcgtagcagattgagcaacgcagcatcgcgcccgtggctggcttccggcaccagatgatcgtggtcgagatagcgcagcggctgatgagaaagccgatgcagatcttcgtcagaaagcccgacaatcgcctggcagcccagcggttcccccagcgcatcggcgcgcataatgttgccaagacgcgaacggatatccgccagccacggctgccacggttccgccagttcaatttgcagccacactgccagcgcaatggtgctgtcgagaaccgcgcgaaaacccagacgcggatcgcttttggcgaccattttttccgccgacaggtgagtcagcgtatccggcttttttgccaccggctggcgacacagttcgcagcacgcctgcggatgttcatcgctactggtcagcccatgaacgggctgcggctgctgctgttcatcgtcaacaaacaggcggccctgctcgtcaataaacttgatgcgcagatggcggctttccagcaactcccgggcagagggcgtcaggcgactgtccgcagggagatggatctctgcgccttcgctgagcgtatggttcgctcttagccatgcttcggtgatgaaatctttcatagggattgccagttagccggccaggcgacatacaggaatttcacgctggatgtcgtaccaaattcgatgctggagcctttcgggataaacatcacgtcgcctgctttggcgatcatggtttggccttcgtggcgaacatgcagctccccttccagcaccatgtcgatttcgtcgtagttcagggtccacgggaagaatgcgttctcccactgcataaaaccggcggccatgctgctgccgtcgtctccggtcacaagatcagtcaagcccacgcaatgcggctctgcgccgtcgaaacgaccaaacttgacgctactgccatcaatcactttgatgccgcctttgccggtcaccgatttgaagctcggctgcattgcgccctgctccagcgactgtttttccttcatcactttttccatcagctgtgcgaccaggctttcggtaaactggccttccggcagctgggcaatgatggtttcgcggatgcgctggctttcggttttgtcggctggcacgctggcgggcacggacgccgttaccgggatcgattcatcacattcggtgatggtaaaacccagtagatccgccacttcacgggcttccggggtaataatgctggcgcgcagaaccacggacattgcctgttcgccgcgcgcgtgtgcttcacgaatatcattcgctgtgatgagttttttcacctgcttcctcctgtttggtgagagatgccagataatccaccagttgctgcacgctttgcgggtcgtggctgtttagctcgaacatcggctcttcgaaacccgtctcaagcaataactttcgcgttgcggcgacgtcagcatctggcatgtccgttttactgatgacggcgatttgccgtttgctgacgccaatatccagcaacccggcaggcaaccgactttccgggtcatttgcgccatggacatagatcagcatgtctacatcctgtagcgtggtaattaaggcgtgataccagcggggatggttaaaatattcacccggcgtatcaatatcgcccttatcattaaattccacggcctgtgtttttctggcgagggtataattcccctgcaacgcattaaataacgttgtttttcctgccccgacgctacccacaaacgcaattcgtttcatgaatgcctcgtattaacttttggtcatttcacaaagcgtataatttaataagcgacctaaaccgctgacggtttgtgataacgcttcttctactgcgcccaccgagccataaatcaccaatgcaccgctgaatcggtcgagaaaaccgatatgcacatcagcggctttcagcgctaaatcaccggcgatcatcgccgtttcgccgggagttagcgtcataatgccaattgcgcccgcatccggaacgccgattttcttcgccagttcctcaccgggatgcgcgatgagatgcgccagtgtgacctgtttgccgggcacaaattcctgaatgatgcgttctttatccatgagtcgccgcctgtgaaaaactttcgtgtatcgtgacaatttttcgtcagagtaaataacaaaattcggcaagcgcgtttaaaaggtgaggtagatcactaagaatggagagatattcgctgtggtgcataaactttcatatgcaacgcatgaatataaataaaataatatcgagatattatatagactgcttttttttattattcgcaaactcagtaataagctttactaatatattgcagctaaactgcttaccctgaatattcagggtaagcgtgagagttaaaaaaaattacagcggttgggtttgcgcttctaccacggccagcgccaccatgttgacgatacgacgcaccgatgcgatcggcgttaacacgtgaaccggtttcgccacacccatcagcaccgggccgacagtcacaccttccgagctggaaacacgcagtaagttgtaactaatgcgggcagcttccatgttcggcatcaccagaatattggcggaacctttcaaagagctgtccggcatacggtcgttgcgaatcgcttccaccagcgctgcatcgccgtgcatttcaccatcaatcatcagttctggtgcacgttccctgaccagttccagcgcctgacgcattttgctcgacgacgggcagtcagaagaaccaaagttggagtgcgacaacaaagcaacgcgcggctcaataccaaaacgacggacagtttctgccgccatcaaggtgatctccgccagctcttctgcatccggttcatcattaacatatgtatcggcaataaaggtgttaccactcggcagcagcagcgcgttcatggcacctgcggtgtgaacgccatcgcgataaccaaagacatttttcaccacgctaaaatgttcatgataatcacccaccgtaccgcaaatcattgcatcggcttccccacgctgaaccatgatcgcgccgatcactgtcgggttactgatcagcgcccgctgcgcctgttcctgagtgacgccgcgacgcttcatgatctggaagtattcggtccagtactctttaaagcgcggatcggattcgttattgacgatctcaaaatcaacgcccgctttgatctgcaagcccagtttctgaatgcgcatttcgatcacgttcggacgaccgataaggatcggtttcgccagtcccagcgttaccagttcctgagtggcatgcagaacgcgcgcctcttccccttccggcagaacaacgcgcttcggcgctttgcgagcctgggagaaaatcggcttcataaacaggttggttttgtaaacgaactcagtcagcttgtcgatgtagacgtcgaaatcagcaatcggacgagtcgccacgcccgactccatcgcggctttagcgaccgcaggagcgatcttaacgatcaagcgcggatcaaacggttttggaatgatgtattccggaccaaagctcagatcctgatcgccatacgctgaagccaccacttcgctctgttccgcatgggcgagttctgcaatcgcacgtaccgccgccagtttcatctcttcgttgatggcggttgcgccaacgtccagcgcgccacggaagatgaacgggaagcacaggacgttgttcacctggttcggatagtcagaacgaccggtgcaaatgatggcatccggacgcacttctttcgccagcggcggcagaatttccggttccgggttcgccagcgccaggatcattggcgcacgagccattttcttcaccatttcctgggtcagcactttcgggccggaacagcccaggaaaatatccgcgccttcaatcacatcatcgagggtacgtttgccgtcatccaccaccgcatatgcggctttggtttccgccatgtttggctcacggccctgatagataacgccttttgaatcgcaaaccacgatgttatgtttttgcagacccagcgctaccagcaggttcatacaggcgattgctgcggcacccgcgccggaaaccaccatccgcacgtcggagatgtttttctccaccacgcgcaagccgttgaggatggcggcagtgctgataattgccgtgccgtgctgatcgtcgtggaataccggaatattcatccgctcgcgcagtttctgttcaatatagaaacattctggcgctttaatgtcttcgaggttgatgccgccgaaggttggttcgagcgcggcgacaacttcaataaatttgtccgggtcgagttcgtcaacttcaatgtcaaatacatcaatcccggcgaatttcttaaacagaacgcccttgccttccatcaccggtttgcctgccagcgcgccaatgttgcctaaccccagcaccgccgtaccgttagagatcaccgccaccaggttacctcgggcggtatatttgtaggcttttaacgggtctttttcgatttcaagacaaggtgcggcaacgcctggtgagtaggccagcgccagatcgcgctgtgttgccagaggcttggttggagaaacctggattttccctggaactggaaattcatggaaatcaagtgcactttgttttaactggtcatccatttggttgttcctttcacgtaacgttcacaaataaagtgtgtgggcaacagcccctgcccacaacgtggcgcacattattaccctgccggagtctacagactttgagcaagtccaaactctcaccattaatataatgttttggtaataatcctataacactgatgttacctgcttaatccagcaataccatgcctgtctgctatgcttttttgatgcgtttagcgaaatttctcagaagtgtgaattaacgcactcatctaacactttacttttcaaggagtatttcctatgaacgagttagacggcatcaaacagttcaccactgtcgtggcagacagcggcgatattgagtccattcgccattatcatccccaggatgccaccaccaatccttcgctgttactcaaagctgccggattatcacaatatgagcatttaatagacgatgctatcgcctggggtaaaaaaaatggcaagacccaggaacaacaggtggtcgcagcgtgtgacaaactggcggtcaatttcggtgctgaaatcctcaaaatcgtacccggtcgcgtgtcaacagaagttgatgcacgcctctcttttgataaagaaaagagtattgagaaggcgcgccatctggtggacttgtatcagcaacaaggcgttgagaaatcacgcattctgatcaagctggcttcgacctgggaaggaattcgcgcggcagaagagctggaaaaagaaggtattaactgcaacctgacgctgctgttttcttttgcacaggcacgggcctgtgcggaagcaggcgtttttctgatttcgccgtttgtcgggcgtatttatgactggtatcaggcacgcaagccgatggacccgtatgtggtggaagaagatccgggcgttaaatcggtgcgcaatatctacgactactataagcaacaccactatgaaaccattgtgatgggcgcgagcttccgtcgcaccgaacaaatcctcgccttaaccggctgcgatcgactgactatcgcaccgaatttactgaaggagctgcaggaaaaagtttcgccagtggtacgtaaattaatcccaccttctcagacgttcccacgcccagctcccatgagcgaagcggagttccgttgggagcacaatcaggatgcgatggcggtagaaaaactgtctgaaggcattcgtctgttcgccgttgatcaacgcaaactggaagatcttcttgccgccaaactataaaccagccacggagtgttatatgtcccgaaaagaccttgccaatgcgattcgcgcactcagtatggatgcggtacaaaaagccaactctggtcatcccggcgcgccgatgggcatggctgatattgccgaagtgctgtggaacgattttcttaaacataaccctaccgacccaacctggtatgatcgcgaccgctttattctttccaacggtcacgcgtcgatgctgctctacagtttgctacatctgaccggttacgacctgccgctggaagaactgaagaacttccgtcagttgcattcgaaaaccccaggccacccggagattggctatacgccaggcgttgaaaccaccaccggcccgcttggacaaggtttggcgaacgccgtcgggctggcgatagcagagcgtacactggcggcgcagtttaaccagccagaccatgagatcgtcgatcacttcacctatgtgtttatgggcgacggctgcctgatggaaggtatttcccacgaagtctgttcgctggcaggcacgctgggactgggcaagctgattggtttttacgatcacaacggtatttccatcgacggtgaaacagaaggctggtttaccgacgatacggcaaaacgttttgaagcctatcactggcatgtgatccatgaaatcgacggtcacgatccgcaggcggtgaaggaagcgatccttgaagcgcaaagcgtgaaagataagccgtcgctgattatctgccgtacggtgattggctttggttcgccgaataaagcaggtaaggaagaggcgcacggcgcaccactgggggaagaagaagtggcgctggcacggcaaaaactgggctggcaccatccgccatttgagatccctaaagagatttatcacgcctgggatgcccgtgaaaaaggcgaaaaagcgcagcagagctggaatgagaagtttgccgcctataaaaaggctcatccgcaactggcagaagagtttacccgacggatgagcggtggtttaccgaaggactgggagaaaacgactcagaaatatatcaatgagttacaggcaaatccggcgaaaatcgctacccgtaaggcttcgcaaaatacgcttaacgcttacgggccgatgctgcctgagttgctcggcggttcggcggatctggctcccagcaacctgaccatctggaaaggttctgtttcgctgaaggaagatccagcgggcaactacattcactacggggtgcgtgaatttggcatgaccgctatcgccaacggcatcgcgcaccacggcggctttgtgccgtataccgcgacgttcctgatgtttgttgaatacgcccgtaacgccgcgcggatggcggcactgatgaaagcgcggcagattatggtttatacccacgactcaattggcctgggcgaagatggtccgacgcaccaggctgttgagcaactggccagcctgcgcttaacgccaaatttcagcacctggcgaccgtgcgatcaggtggaagcggcggtgggctggaagctggcggttgagcgccacaacggaccgacggcactgatcctctcaaggcagaatctggcccaggtggaacgtacgccggatcaggttaaagagattgctcgtggcggttatgtgctgaaagacagcggcggtaagccagatattattctgattgccaccggttcagagatggaaattaccctgcaagcggcagagaaattagcaggagaaggtcgcaatgtacgcgtagtttccctgccctcgaccgatattttcgacgcccaggatgaggaatatcgggagtcggtgttgccttctaacgttgcggctcgcgtggcggtggaagcaggtattgccgattactggtacaagtatgttggtctgaaaggggcaattgtcgggatgacgggttacggggaatctgctccggcggataagctgttcccgttctttggctttaccgccgagaatattgtggcaaaagcgcataaggtgctgggagtgaaaggtgcctgatggtgattgccggatgctgattgccggatgcgacgctgacgcgtcttatccggcctacagcgtcttatccggcctacatgtcccgccattttgtttaacgggtgatccacaacgtgggccaggcgtctggcccatgccagttatcgcaggtgggttctgcggcgtaacgcaccaggcgaaaacgctgaccgtcaaagcgccagcgcgcctgaatgccacaatcgcttaatccgcgccctttcgctaaggtcaccagttcacgcgatttctcatcaaatgttgcgttcatcagttccagttcattcgtctcctgaccgttgttgaacggcaaacgcaaccgaaccgggcgcgaagctagtggctttttacgcgacacaatccatgccaaatcaatggtgttataggcccctgcctcacagctaatcatcatcagcgctttatcatcagtcagcgcagtgacattcacctcacgacgcaatggatcaagcgagcagcgcagaccattcatccgccagtttccataatccagcaaatcgttgcgttcttcgagtgagagtggcgtcggcgttgggttaaccaccgcgacctctttcagcgcaggcgcgggcggtacgctgagcggcggttcgtcccctttcttgatccacgcggtttcactgccaacgcgcttttgctgagcatcaataaacaacaacgctgcttttaagccactcagagaaatggtctgatcgccatcgcgtaaggtgattgccttcccttcctgaatcatctgcaaaaacgcggtgatggttgccgtatcatcggttactaataaccatggtgaaatccgccacttgtcaccacttaacgccaacggctcgccatctaacagcagccgtggcgctatctccccttctgacgcctccggcgacttcaatccgccgcgctcaatacgtaaaacggcatcggtatgcgccccggcgctgcggctcagggtcatcaccagtccattatgatcgcccgtattacgcgccacgcagaaattttggttattacaggtgacctgccagtcggaaaacgcccgttgcgctggtgccgcccacaccaaagacgtcggcaacaaagcgaaaaaaaagagaaggaaaatgcgatagcgcatggacggtacgaccccagaagttcaaacaaacagcacaagtcgtatcttcgttgcgcaggtagcgcggctcaatcggatttgtcggattgagccaataataaacaacgaaatattattgttatttttcagtccattaaatgtgacgtttgcaaatagttaagcaataacaccgtcttaccgtcacgtatctcgccggttttgatcatctccagcgcctggctgaacggcagctcgagcacttcaatatcttcatcttcgacaccgccaccggcgttagcgcgctgattgtcactgtattcggcgataaaaaagtggattagctcagtcacaccgcctggcgacatatacagttcaaataatttgcgcacttcacccacttcatagcccgtctcttcaatcgcttctttgcgaatacacacttccggttcgtcgttatccagcagcccggcgcagctttcaatcagctgcccgctttcattgccattaacccaggtagcgacacggaactgacgaatcagaaccacggtctttttcttcgtgttgtacaggaggatcgtcgcaccattgccgcgatcgtacacttcacgtttatggcggataacttcgccgtctttgcgcgtgagatcgtaagtaatgttgtgcagggtgaaatagttatcggagagaattttgtctttaatgagggtgatttgttgcgtcataccgactccacagcgcgaaatgaacaattatcttacgctgtgaagtcgggtttgtctgcgcaggctatcagtgagatttgactgattttacccccagccagtcaataatcccctgtgccgcatgacgtccttctgccattgcggtaaccaccagatccgcaccacgcacggcgtcaccaccagcgaagattttcggattggtggtctggtaacggtactggctttccacatccgcgatgatgcggccccatttgtctaccgttacaccgtgcgactccagccacggcatcccgtgcggattgaagccaaacgccataatcaccgcgtcggctggcatgacaaattcactgccttccaccggcactggacgccgacgcccctgggcatccggctctccaagacgcgtgcgcaggaaacgaatcccgcagacgtgaccttgttcattcagctcaagcgccaccggctggacgttaaattcgaagttggccccctcttcgcgggcgttcttcacttctttcttcgagcctggcatgttagcttcatcacgacgataagcgcaggtgacgttactcgcgccgtggcgcagtgcggtacgcacacagtccatcgcggtgtcgccgccgcccagtaccacgacgttaagtccggcggtattgataaacggctcttccggtagctcttcgagccccatcacctgtttagtgttggcaatgaggaacggcagcgcgtcataaacgcccggcgcatcttcattgggtaaacccgctttcatggaacggtaagtgcctacgccaacgaagaccgcgtcgtattgttccaaaagcgaatccaaagagacatctttacccacttcacaattgagttcgaagtgaatccccatcgcgctgaagatttcccgacggcgtgccagcagggatttatccagtttgaaagaaggaatgccgaaagtgagcaagccaccgatttctggatggcgatcgtacaccgtcacccccacgccattgcgggtcagaacatccgcacaggccagccctgccggacctgcaccgataatcgccacccgcttgtccactttggtgacatggcttaagtcaggacgccaacctttcgccaacgcctgatctgaaatgtagcgttcaatgttgccgatagttaccgcgccgtgctcatcgcgaatagtacaggcaccttcacacaaacggtcttgcggacaaacgcgtccggtaatttccggcagggtgttggtctggtgagaaagctcgacggcggcgtcgatgtttccggctttcaccagttcaatccactgcggtatatggttatgcagcgggcaggtccattcacaaacgctgtgctcgccgcacttaaggcagcgcgaggcttcccgttgtgcctggtcggcgcgaaatggcagataaatttcatcaaaaccggttttgcgcgcttcaatcgccagtttatccggctcgccacgcgcgggcgttgcctgcatttgttcgactttactcattaccggcatttcttgcgccgcggtactggcatgccacggttgatgttcctgacgcgcggtgcgcaagcggcgggatttcgccatgccggagagtgcgacgtcagtgaccagttgcagcgcgtccgccgggcaattctcaacacaggcaggaccgttttcgcgccccgcacaaaggtcgcatttatgcgccgtggcttttacttttcctgccgcgacgggtgtcaggacgatttgcatcgtaccaaaaggacaggccaccacgcaggatttacagccaatacacttttgctgattgacctgaatgctgtcatcaacgtggctgattgcgccattagggcagctacgggcgcagggcgcatcttcacaatggtgacaggtcactgcactacgttgctgttgatgtttgataaccgtaattcggggatgaaaatggtgttggctcaggacatgttgctcatcattgtgagccatgacacaggcgatttcacaagcatgacaacccagacattgctgactgttggccataataaaacgattcataacgaccttcttttttggttgtaaaaaccttattctttatatgagtgttgttattacccgacttacaggggaatcggcaatgttcatgtgcccagaataagtaactatttcgctataaactgtggcagatcaaataatcccatcactgactaaattgcgtttcagcgaactggaacattaatgattttttgtggagaagacgcgtgtgattgttaaacgacccgtctcggccagtctggcccgggcctttttttacattgtgctgctgtcgattctttccacgggtatcgctctgctaactctggcgagcagtttgcgcgacgctgaggctatcaatattgccggatcgctgcgtatgcagagttaccgcctgggctacgacttgcaaagtggcagtccacaactcaatgcacatcgccagttatttcagcaggcactgcattcaccggtattaaccaacctcaacgtctggtatgtgccagaagcagtaaaaactcgctatgcgcatctgaatgccaactggctggagatgaataatcggctcagcaagggcgatttgccgtggtatcaggccaatattaataattatgttaatcagatagacctgttcgtactggctttacagcactacgctgaacgcaaaatgctgctggtggtggcgatttccctggctggcggcatcggtattttcacgctggtcttttttactttgcgccgcatacgccatcaggtggttgccccgctgaatcagctggttaccgccagtcagcgtattgaacacgggcagttcgactcgccgccgctggataccaacctgccgaatgagcttggtctgcttgcaaaaacctttaaccagatgtcgagcgagctgcataaattgtaccgttcgctggaagcgtcagtagaagaaaagacccgcgatctccacgaggccaagcgtcgtctggaggtgttgtatcagtgttcgcaggcgctgaacactagccagattgatgtgcattgtttccgccatattttgcagattgttcgcgacaatgaagcggctgaatatctggagttaaatgtcggtgaaaactggcggattagcgaagggcaaccaaacccggaattgccgatgcagattttaccggtgacaatgcaagagacggtttacggcgaactgcactggcaaaatagtcacgtttcatcatcagaaccgctgcttaacagcgtttcgtcgatgctgggacgcggtttgtactttaatcaggcgcagaagcattttcagcaattattgttgatggaagaacgtgcgaccatcgcccgcgaattgcacgactcgctggctcaggtactttcttacttacgtatccagttgacgttactgaagcgttcgataccggaagataacgccaccgcacaaagtatcatggccgatttttcccaggcgttgaatgatgcttatcggcagttacgcgagctgttgactactttccgcctgacgctgcagcaggcggatctcccctccgcattgagggaaatgctggatacgttacaaaatcaaaccagcgccaaactgaccctcgactgccgtctgccaaccctggcactggatgcgcaaatgcaggtgcatttgttgcaaattattcgcgaagcggtgctgaatgcgatgaagcacgccaacgccagcgaaatcgccgtcagttgcgtcaccgcgccggacggcaatcacacggtttatatccgtgataacgggattggtatcggtgaaccgaaagaacccgaaggtcattatggtctgaatatcatgcgcgaacgcgcggaacggctaggtgggacgctgactttttcacaaccttccggcggcggcacgttagtgagtattagctttcgctctgcggagggtgaggaaagtcagttaatgtaatgcctcctactgaccaaagaatacttgcacttaaggttcagtataaaagggcatgataatttacattaactcctttttttctccacgattggctcgtaccttgccgctacagtgaagcaagtcaagcctacaacgatacgcagaaacacgaggtcctcttttaatggcgaatttctttattgatcgccccatttttgcctgggtgctggcaatcctgttgtgtctgacaggtaccctggcgattttttcattgcccgttgaacaataccccgatctcgcgccaccgaatgtgcgagtgaccgctaactatcccggcgcatcggcccagacgctggaaaacaccgtgacccaggttatcgagcaaaatatgaccggcctcgataatctcatgtatatgtcatctcagagcagtggcaccggtcaggcatctgtcactttaagttttaaagcaggcaccgatccggacgaagccgtgcagcaagtacaaaaccagctgcaatcagccatgcgaaagttaccgcaggcggtgcaaaatcagggcgtgacggtgcgtaaaaccggcgataccaacattctgaccattgccttcgtctctaccgatggttcgatggataaacaggatattgctgattatgttgccagtaatattcaggacccgttaagccgcgtgaatggcgtcggggatatcgatgcctatggttcgcaatattccatgcgtatctggctggacccggcgaaactcaacagtttccagatgacggctaaagatgtcactgatgccattgagtcacagaacgcgcagattgcggttgggcaacttggtggtacaccttccgtcgataagcaggcgctcaacgccaccattaacgcccagtcactgctgcaaacaccagaacagttccgcgatatcaccttgcgggtcaatcaggacggctcagaggtaaggctgggcgatgtcgccaccgtcgaaatgggggcggagaaatacgattatcttagccgcttcaatggtaagccagcctccgggctgggggtaaaactggcctccggcgctaacgaaatggcgacagcggagctggtgctcaatcgtctcgacgagctggcgcagtatttcccgcatggactggaatacaaggtggcgtatgaaaccacctcgtttgttaaagcctccattgaagacgtggtgaaaacgctgctggaagctatcgctctggttttcctcgttatgtatctgttcctgcaaaacttccgcgccacgctgatacccactatcgccgtgccggtggtgttgatgggaaccttctccgtactttacgccttcggttacagcgtcaacaccttaaccatgttcgcgatggtgctggcgatcggtctgctggtggatgacgccatcgtggtggtggaaaacgtcgaacgtattatgagtgaggaaggactcactcctcgcgaagccacacgtaaatcgatggggcagatccagggggcactggtcgggattgcgatggttctttcggcggtatttgtaccaatggccttcttcggcggcaccaccggtgccatctatcgccagttctctattaccattgttgcggcgatggtgctgtcagtactggtagcgatgatcctcactccggctctgtgtgccacactacttaagccactgaaaaaaggtgagcatcatgggcaaaaaggcttttttgcctggtttaaccagatgtttaaccgcaacgccgaacgctacgaaaaaggggtggcgaaaattctccaccgtagcctgcgctggattgtgatttatgtcctgctgcttggcggcatggtgttcctgttcctgcgtttgccgacgtcgttcttaccgctggaagaccgtggcatgtttactacctcggtacagttgcccagcggttcaacgcaacaacagaccctgaaagtcgttgagcaaatcgagaaatactacttcacccatgaaaaagacaacatcatgtcggtgtttgccaccgttggttctggccctgggggtaacgggcaaaacgtggcgcgaatgtttatccgcctgaaagactggagcgaacgcgacagtaagaccggcacctcgtttgccattatcgagcgtgcaacgaaggcgtttaaccaaattaaagaagctcgcgttatcgccagcagcccgccagcaattagcggtcttggtagttctgcaggttttgatatggagttgcaggaccacgctggagcgggtcacgatgcgctgatggcagcacgtaatcagttgctggcgctggcggcggaaaacccggagctaacccgtgtgcgccataacggcctcgacgacagtccgcagttgcagattgatatcgaccagcgtaaagctcaggcgctgggcgttgctatcgacgatattaacgacacactgcaaaccgcctggggttcgagctatgtgaatgactttatggatcgcggtcgcgtgaagaaagtctatgtgcaggcagctgcgccgtatcgcatgctgccagatgacatcaatctctggtatgtccgaaataaagatggcggcatggtgcccttctctgctttcgcgacctcacgctgggaaacaggctcgccgcgtctggaacgctataacggttattctgcggttgagattgttggggaagccgcaccgggggtcagtaccggtacggcgatggatattatggaatcgttagtgaagcagctgccaaacggctttggtctggagtggacggcgatgtcgtatcaggagcggctttccggcgcgcaggctccggcgctgtacgccatttccttgctggtggtattcctgtgtctggctgcgttgtatgaaagctggtcggtgccgttctcggtaatgctggtcgtgccgctgggggtaatcggcgcgctgctggcaacctggatgcgcgggctggaaaacgacgtttacttccaggtgggcctgttaacggtcattggtttatcggcgaaaaacgccatcctgatcgtcgagtttgctaacgagatgaaccaaaaaggccacgacctgtttgaagcgacgctccacgcctgccgtcagcgtttacgcccgattctgatgacctcgctggcatttatcttcggcgtattgccaatggcaaccagcacgggtgccggttccggtggtcagcatgcggtgggtactggcgtaatgggcgggatgatttcggccactattctggctatttacttcgtgccgctgttctttgtgctggtgcgccgccgcttcccgctgaagccgcgcccggaataagcaataaaaaaggcgacatgccaatgtgtcgcctttttcaactttccgattaagaacctgctcagcgggttcttgctgtttgtactttgtctcaggaattacttacgaagcataacttcgataaagtctttccagttccccagttcacgttcaatcataacaacctctcttataattatgggtattctacggaaacaatataccgtggtgaagctaatttactcgattgctgcgatgactacctccgggggacaaatcttatgtaaatactatggtcctgcggtgatgatttgtatgtgatacacagcaacatttcgagatattcatacggcatctaatactgatttaattctggttaaaatacagacagataacaagatgaatattcttaatgtttacgttaaaaatgtttaatattatttaatagttgttaatttgaatacttcgataatgttatatttcctgataatcatttgcaggcaaaatgttttcacccttaaatgagtatttattctcataaatcgaaaaaggattcattatggttacactttacggtatcaaaaattgtgacaccattaaaaaggctcgccgttggctggaagccaataacatcgactatcgttttcatgattaccgcgtcgatgggctggacagcgaattattgaacgattttatcaacgaattaggctgggaagcgttactcaacacccgtggtacaacctggcgtaaactggacgaaaccacccgcaataaaatcaccgatgcggcctctgcggcggcattaatgactgaaatgcctgcaattatcaaacgtccattgctctgcgtgcccggtaagcctatgctgctgggtttcagtgattccagttatcagcaatttttccatgaggtgtagtctatgtcgtgcccggttattgagctgacacaacagcttattcgccgcccttccctgagtcctgatgatgcaggatgccaggctttgttgattgaacgtttgcaggcgatcggttttaccgttgaacgcatggactttgccgatacgcagaatttttgggcatggcgtgggcagggtgaaacgttagcctttgccgggcataccgacgtggtgccgcctggcgacgccgatcgttggatcaatcccccgtttgaacccaccattcgtgacggcatgttattcgggcgcggtgcggcagatatgaaaggctcgctggcggcgatggtggtggcggcagaacgttttgtcgcacaacatcccaaccatacggggcgactggcatttctgatcacctctgatgaagaagccagtgcccacaacggtacggtaaaagtcgtcgaagcgttaatggcacgtaatgagcgtctcgattactgcctggttggcgaaccgtcgagtatcgaagtggtaggtgatgtggtgaaaaatggtcgtcgcggatcattaacctgcaaccttaccattcatggcgttcaggggcatgttgcctacccacatctggctgacaatccggtacatcgcgcagcacctttccttaatgaattagtggctattgagtgggatcagggcaatgaattcttcccggcgaccagtatgcagattgccaatattcaggcgggaacgggcagtaacaacgttattccgggtgaactgtttgtgcagtttaacttccgcttcagcaccgaactgactgatgagatgatcaaagcgcaggtgcttgccctgcttgaaaaacatcaactgcgctatacggtggattggtggctttccgggcagccatttttgaccgcgcgcggtaaactggtggatgcggtcgttaacgcggttgagcactataatgaaattaaaccgcagctactgaccacaggcggaacgtccgacgggcgctttattgcccgcatgggggcgcaggtggtggaactcgggccggtcaatgccactattcataaaattaatgaatgtgtgaacgctgccgacctgcagctacttgcccgtatgtatcaacgtatcatggaacagctcgtcgcctgatgagtggttctgcaagaggaaataagcatggactggctggctaaatattggtggattctggtgattgtctttttggtaggcgtcctgctgaacgtgattaaagatctcaagcgcgtcgaccataagaaatttctcgccaacaagccggagcttcccccgcatcgtgatttcaacgataagtgggacgatgacgacgactggccgaaaaaggatcaaccgaagaagtaagctgagtgctcaaccgtaggccggataaggcgttaacgccgcatccggcaatggtgaacgatgcctgatgcgacgctcacgcgtcttatcaggccaggtaatctgtcttttacatcatttcaatcacatcatcatcgccaggcttaccgccacttagcgcttcgtcgaaataatgtttcggaatggtataacgcaagtgatccagggcaaattgcatactgcgattgtcgatcgcatggcctaaatcctccacgatatccagcgtcacgtcaccaccggcactgattaacgcttcctgcgccgcaaccgcatgcgccagatcgataaccggatcttcaccgccatgaatcaggtgaattgtcgtggctgtagacgcagtttccggcaggctcgcatagcgtccgttaaaagcaatgacgcgtgaagcaaggcccggttcggctttaatgctctccagcaccataatcgcgccttgagagaaaccgatgagcgccgtggcgttagcccctactccgctctgtttctgccagtagcgcaccgtttcaataaacgtcggcatgatcgcatccacacgcgcctggcgattatcttccgtaataccctgcaccgaaaaccactgacgccccgccggattaccgctcggctccgcgccaccgacactcaccaccagcgcatcaggaaacagcggtgcaaaccagttgcctatttcccccattgccaccgggttatccccgacaccgtggaaaagcagtaacaactgttgcgcaggtttatccgggctttgaacaacaaaatggtcatgtttcatggcgaactccttaactgatgtcattaattttacgccgctgactcacaatgaccatgagataaaattgaaggagtcagtgaaataattgccattgcgttatgcgatcgcgcagacgctcagtgcgaacatcattaagtgcgaacagcgcctgcgcggcctcttcccgctgacggaccagtaacatcttgcggcctgaaagtttaagtgtggtacataactgcgcatcactggcgtttttctgtaaacgcccacgcagcgccggtaatgccagttcactggtttgtaacagacgcaataagcaacctaacgacgttaatagcggacgatgagcgaaagcaaaaccggccagttcaagccagtcgtcgtcagaaaggacggcatcgtttagtggatcaacaggaagcgtttcgccattccactgcgcgagagcttgcgcatcgcgacgtaaacggtaatgctcacgttcagccagctgtttacccgcatcactcatcggtaacagcgccatcgccgtatagcaaccgctgctggcttcccgatgattacccatccgcaccagcacaaaaccgcagcgttgccagaaacgccataactccccggtgtaaccaaaactcaccgaaagatagtcgaggtcttgcgtatattgcaaagcaccagcaataagttgccgccctgtgccttcccgctgacgagccggatgaactgctatccggctgacccgccgtccacgcaatgtcgccgccagtggattgttgccgtgcgccgccagcgactgggccaccagattaccccgcgggcgacgaaaacctgcccataccgcctgactgagttgttgagataatccaccctcatccaccagccacagcgccccggcaatctcgttttcgccagccgcctgtaaaaaatgttgccctggtgcatccatcatccggcgtaaatccagcggcgaagtccgatagtgcgcaccagacaagagctgataaacctttaacggcgtttctggatcgctttgccataacgtctgttcaaatgcggaaatgacaatattgccttgtggtgtatgggtgaagttttcatcgtcaaaaaccagtgcctcgctgaccattttttccagcgggcatccctgcgcccagcggatcggctgttgcagttcaaaacggtgtaaatgcggaaagcgagcgcaaaatttcagcaaaaaaccacgtccggtgccttcgtagccctgcaccgtagtggttaacaacgttcgaggaaaacgcgataccagttgatgcaacaatggcgcaggtatggctgcggcttcatcgaccaccagccagtcggcttgctcatcgctggctaacaaggcatccggcgcaataaagcgaaacttctcgcccgcaaattgtgccagtacatccgttgacgcttttgcgggcgcggtgacaatcgctctgcccgcaatacgagaaatgagttgccctgccaacgccgacttaccgcgcccacgcgcagccgttaccgctgccacgcccggcggcatggtcattagctgctttaagagttgctgttgttctggttgtggtgcgccagtcgcggggtaccagtcagtacggggagtaaaatgcgccaacgagaatggctggttttgccgccagaggatagcctcgttatccgccgtaagtacgcgtttgagatgctggacaaaatgcggcgtcgcaatagggtcagggcaatcactccagcgcagcgagtcggcatcaggttggttttcccactcttcccatacagggagtaacaaaaccagccagcttcccgctttcaacgttccgctaagtgcggcaaaggcagcggcatcaaagccgtggcgggcgtcgaataccgcatgccggaactcgcgcccaagtaaagtttgtagtgccgagggagaacagtggttttcagcatctggccgcggcgaaatccacagccagtcgccaggtaaggcatcacgcaacttaagagtatgctcaaaacaccaaccctcttccccgctcaacaccagcaagcggcggatcccttcacgtttcatttgcgctgttaatgtgtgaagcgcagtcagttcagccatccctgccccggaagttaaatgcttttaccaaaagtattgcattgtgccggatcgccgctgtcgaaaccacgtttaaaccagctgtagcgttgctgagaagtgccatgagtgaaactgtctggtactactcgcccctgactttgctgttgtaaacggtcatcgccgatggcctgcgccgcgttcagcgcctcttccagatcgccggtttccagaacgccttgctgctgcatactatgcccccagacaccggcaaaacagtcggcctggagttccatacgcacagataagcggtttacttccgcctgcgtcgcgttttgttgcagttgacgaactttcggctcgatgcctaacagtttctgcacatgatgaccgacttcatgggcgataacgtacccctgggcaaaatcgccatccgcgccaagtttgtctttcatgtcatcatagaaggagagatcgatataaaccgtgccatccgccgggcaatagaacggccccattatggactggcccgccccgcagccggtacgcgtcattccacggtacatgaccagcttcggttgctgataggtcttacccatcttctcgaactgttgtccccaggtgtcttccgtggttgccagaatcaccgaggtgaattttgcggcttcgtcttcatttgggctaattgaccgcgttgattgttgttgggaaaccggctgcccggtcatcaacccggttaaatcaacaccatagtagcctgcaaccagcacgactatcagtaaaatcagcccgcctttaccgcttggcaggcgaaaaccgggaccgcccatagatggaccaccagagctgttgcgcctgtcttcaacattgtcactttcacgtcgcccttgccaacgcatagatacctcaacaatatattcattatagaaatgatcgtaggtggttcagaggaagattaccacaggaaagcgggatgaaatggcggaggaatgagcgttcaatgcatatattccgagagcggttgtcttgccgtgccagctgcacggcaagatgatgaacagaaaaatcagtccagctgtacacccaggcggcgggcgacggcttcataggcttcgatcaggccaccgaggctctggcggaaacggtctttgtccattttctccagcgtttctttgtcccacaggcggctaccgtccggggagaactcatcacccagtaccacttcgcctttgtacagaccaaattccagcttgaagtcgaccagaatcagaccagcatcatcgaacagttttttcagcacgtcgttcgctttgtaggtcagctctttcatacgcgccaggttctctttgctcacccagccaaaggtttcgcagtaagattcgttgaccatcggatcgtgcatggcgtcgtttttcaggaacagatcgaacagcggcgggttcagctcaataccttcttcgattccaagacgtttcaccagagagccagcagcacggttacgcacgacacactcaaccggcaccatatccagctttttcaccagacattcggtatcggagagcagacgctccatttgagtcgggatacccgcttcagccagtttgctcataatgaagtagttgaacttgttgttcaccatacctttgcgatcaaactgctcaatgcgcgcgccatcccctgctgacgtatcattgcggaattcgagcaccaacaggtccgggttttccgtgctgtatacggttttcgctttaccacgatacaactcagcttgcttttgcatctttatcactcctgggtgtgaattaacgttttaaaatcttttgctgtctggtgtgccggatgttttgtcggatgcggcgtgaacgccttatccgaactacgtccgacaaacaaatttcgtgcgaattaccgctaaaatcgcgttttcctgcagacgcacacgtttgcgtatcatatcagaaaaaagggccggatgattccagccctgtatttttacttgctaaacgcagcctggaagacagctaccagcgcgtcgttctgactctgagtcagagtatgacctttcggatcgatgaactgtaggctgctgcggttatctaaatcgccaacctgcagtttatagtcaccggatgccaggcctggatcgctcgcgcccagttcctgccagtcgctgtcagacagcggcttataagttacggccatgttgccctgcgaacgggtgctgtcggtcactttcatgcccactttttccagcgccgctggcagacgttgccaaaccacattgaacggcccgcgtacgaccagcattggtaaaccggtgtcatcagctgcactttgtacgtccatagtggtggaggcacgattttgcgcagcgttcgcggcgtcagtggcagatttatccagaccggcggaaataacgttcatcatctccgtgctgtaacgctgcatggaagccgcgtctgcaaccggtttgcccgcctgttccaggttcagcagtttaaccgtaaccgcctgctgataaccctgcggcttaacagagatttgataacgaccacgatactgctcgtcttcgtccagacggttccattgtacccaatcggtggtcagtgtctgaccagcatcatcacgttgggtgatggtgtagtttttcgcctgcagcacgctaaccacctgcggccacagagtattgccacgaccattttccaccagcaatgaagcggtatcgcccgtgaactgggtacgcgcgccagaaaccagtgccagcggctgggctggtggacgaatgtccagcgccttaccgacagcaccactaccgttggtcaccgggattgcataatcaccggaggtcaccggcaaaatcattccagccggggcatgaagctccgcaagcggtgccgcttccaggtaggcttcatcaccactgacctgacgcttatagcgtgagtcagaactacaggcagcgagtaataaaacaagcgaaacacccgcaacctttgccaggcgcgacttttgaacagagtaagccatcaaatctccctaaactttacagcaaaccggcatgcttaagcgccgctctgaccgtctcacgaccactgtcggtgattggtgtcattggcaggcgcagcgtatcggtcgccacaagacccagttccttacatgcccatttcaccgggattggattgggttcgacaaatagtttgttgtgtaatggcatcagacgctgattaataacgcgtgcctcggcaaaatgcccttctgctgccagtttgcacatctgggccatatcacgcgctgcgacgttagccgtaacggaaataaccccatgaccgcccaattgcatgaagtccagcgcgctcgcatcatcgccgctcagcagaacaaaatcatctgaaaccagctctttgatctggtttacacgcgttaagttccctgttgcctctttgattccgataatattttttactttcgccagacggcccaccgtttccgggagcagatcgcagccagtacgggacggcacattatacagaatttgcggcaggtcagtatgctcagcgatggctttgaaatgctgatacaaaccttcttgcgacggacgattgtagtaaggggttaccgtcaggcagccgacgataccactgtcattgaagcgctgcgtcaggctaatggcttccgcagtagcgttagcgccggtcccggcaattaccggaatgcgcccatcagccagatccagcgtcatcatcaccacatcagcatgttcgtcatgatttaaggtagcggactcgccagtggtgccaacagaaacgatcgccgaagtaccgctggcgacatgataatcaatcagttttttcaagctagcccgacagacattacctttttcatccatcggagtaacaatcgcgacaatacttcccgtgaacatgggccatcctctgtgcaaacaagtgtctcaatggtacgtttggtatggcattaaaagcaagcagacagaaccgttctgattgttgtatgcatgttttttttatgctttccttaagaacaactcaccccttaaaggaataaccagtttgacactgtcatcgcaacattatctggtgatcactgcgttgggtgccgatcgccctggaattgtgaacaccatcacccgtcatgtcagtagttgcggctgtaatattgaagacagtcgcctggcgatgctgggagaagagttcacgtttattatgctgctttccggttcatggaatgccattactctgattgaatcaacgttaccgttgaaaggtgccgaactggatcttttaatcgtgatgaagcgcacgacggcgcgtccgcgtccgccaatgccagcatctgtctgggttcaggtcgatgtggcagactccccgcatttaattgaacgcttcacagcacttttcgacgcgcatcatatgaacattgcggagctggtgtcgcgcacgcaacctgctgaaaatgaacgggctgcgcagttgcatattcagataaccgcccacagccccgcatctgcggacgcagcaaatattgagcaagcgttcaaagccctatgtacagaactcaatgcacaaggcagtattaacgtcgtcaattattcccaacatgatgaacaggatggagttaagtaatgaatccactgaaagccggtgatatcgcaccgaaatttagcttgccggatcaagacggagaacaagttaatttgaccgacttccagggacagcgtgttctggtttatttctacccgaaagccatgacccccggctgtaccgtacaggcctgcggcttacgcgataacatggatgagttgaaaaaagcgggcgttgatgtgctgggtatcagcaccgataaacccgaaaaactctcccgttttgcggaaaaagagctgcttaactttacgctcctgtctgatgaggaccaccaggtgtgcgaacaattcggcgtctggggtgaaaagtccttcatgggcaaaacctacgatggcattcatcgcatcagcttcctgattgacgctgatggcaaaatcgaacatgtctttgacgatttcaaaaccagcaatcaccacgacgttgtgctgaactggctgaaagaacacgcctgattactttgctccattccgtgctggctgcgcttgcggccagcatacctcacttctcgtgatcaagatcacattctcgctttcccctgcgacacgggtgtcgaatccattttttgctgaacgttaatgaccatcatttttgtaccgttcagaatccagttaatacataacttattgaatatattgagttaatcagaatggcatcctttatgcaatatgaaatgcaatgtttcatatcattttcaaggagccgacatgaaccgctttgtggtggccgaaccactgtggtgtacaggatgtaatacctgtctcgctgcctgttcggacgtgcataaaacgcaaggtttacagcaacacccgcgcctggccctggcgaagacgtcaacaatcactgcccctgtcgtgtgtcatcactgtgaggaagccccttgcctgcaggtctgcccggtcaatgccatctctcagagggatgatgcgatccaactcaacgaaagcctctgtattggctgcaagctttgcgccgtggtctgcccatttggcgcaatcagcgcttcaggaagccgtccggtgaatgcccatgcgcaatatgtttttcaggctgaaggctcactcaaagacggcgaagaaaacgcgccaacacaacatgctttgctgcgctgggaacctggtgtccagaccgtcgcggtgaaatgcgacctgtgtgatttcttgccagaaggtccggcctgcgttcgcgcttgcccgaatcaggcgttacggctgatcaccggtgatagcctgcaacgtcagatgaaagaaaaacagcgccttgccgcaagctggtttgccaatggcggggaggatcccctttccctcactcaggagcaacgctaatggatgccctgcaattattaacctggtcgctgattctctatctgtttgctagtctggcttcgctgtttttactcggtctggacagactggctattaagctttccggcatcacatcgctggtgggcggcgtgattggcatcatcagcggaattacgcaattacatgctggtgtaactttagtcgcccgttttgcccccccttttgaatttgccgatttaaccctgcgaatggatagcctctcggcatttatggtgctggttatctccttgctggtggtggtttgttctctctattcattgacttatatgcgcgaatacgagggcaaaggcgcggcggcgatgggcttctttatgaatattttcatcgcatcgatggttgccctgctggtgatggacaacgctttttggttcatcgtgctgtttgaaatgatgtcgctgtcttcctggtttctggtcattgccaggcaggataaaacgtcgatcaacgctggcatgctctacttttttatcgcccacgccggatcggtgctgataatgatcgccttcttgctgatggggcgcgaaagcggcagcctcgattttgccagtttccgcacgctttcactttctccggggctggcgtcggcggtgttcctgctggcctttttcggttttggcgcgaaagccgggatgatgccgttgcacagctggttgccgcgcgctcaccctgccgcaccatcgcacgcttcggcgttgatgtctggcgtaatggtcaaaataggtattttcggcatcctgaaagtagcgatggatctgctggcgcaaacgggtttgcctctgtggtggggcattctggtgatggcgatcggcgcaatctccgcgctcctgggcgtgctatatgcgctggcggaacaggatatcaaacggctgctggcctggagtaccgtcgaaaacgtcggcattattttgctggcagtcggtgtggcgatggtcggtctgtcactgcacgacccgctgctcaccgtggttggactgctcggcgcactgtttcatctgctcaaccatgcgctgttcaaagggctgctatttctcggcgcgggagcgattatttcgcgtttgcatacccacgacatggaaaaaatgggggcactagcgaaacggatgccgtggacagccgcagcatgcctgattggttgcctcgcgatatcagccattcctccgctgaatggttttatcagcgaatggtacacctggcagtcgctgttctcactaagtcgtgtggaagccgtagcgctacaacttgcgggtcctattgctatggtaatgctggcagtcactggtgggctggcagtaatgtgcttcgtaaaaatgtacggtattactttctgtggtgcgccgcgcagtacacacgctgaagaggcacaggaagtgccaaatacgatgatcgtcgccatgctactgctcgcggcactctgcgtattaattgcgcttagtgccagttggctggcaccgaagataatgcatattgcccatgcgtttaccaatacccctcccgccactgtcgccagcggaatagcacttgtacccggcacgtttcatacacaggtcaccccctcattactgttgctgttactactggcgatgcctttgctgcctggcctttactggctgtggtgtcgttcgcgccgcgcagcgtttcgtcgcacaggagatgcctgggcatgcggctacggctgggaaaatgcgatggccccgtcaggcaatggcgtgatgcagccgctgcgtgtggtcttttctgcgctatttcgtctacgacaacagctcgaccctacgctgaggctaaataaaggtcttgcgcacgtcaccgccagggctcagagcacagaacccttctgggatgagcgggtgatccgccccatcgtgagcgccacccaacggctggccaaagaaatacagcatctgcaaagcggcgactttcgtctctattgcctgtatgtggtcgccgcactggttgtgctgctaatcgctattgccgtctaaggaaatcaccatgagacaaactctttgcgacggatatctggtcatttttgcgttagcacaggccgtgattctgctgatgctaaccccactttttacgggtatttcccggcagatacgcgcgcgtatgcactcccgccgcgggccggggatctggcaggattatcgcgatatccacaaactgtttaaacgccaggaagttgcgccgacatcttcaggtctgatgttccgcctgatgccgtgggtattaatcagcagcatgctggtgctggcgatggccttaccactgtttattaccgtttccccttttgcgggcggcggcgatctgatcacccttatctatcttcttgccctgtttcgttttttctttgctctttccgggctggataccggaagtccgtttgcgggagtcggtgccagtcgcgagttgacgctcggcattctggtcgaaccaatgcttattctctcactgctggtattggcgctgatagcaggttccacgcatatcgagatgatcagcaatacgctggcgatgggctggaactcgccgctaaccaccgtactggcgttactggcctgtggttttgcctgcttcattgagatgggaaaaattccctttgatgttgctgaagcagaacaggaattacaggaaggcccgctgaccgaatattccggtgccgggctggcgctagcgaaatgggggctggggctgaaacaggtcgtgatggcatcactgtttgtggccctgtttctgccctttgggcgcgcgcaagaactttctctcgcctgcctgctgacttcacttgtcgttacgctgctcaaggttttgctgatttttgtactggcctcaatcgcagaaaacacgctggcacgcgggcgttttttactcattcaccatgtgacctggcttggcttcagccttgctgcgcttgcatgggtcttctggttaaccggtctgtaaggagcactgacggaatatggaaaatcttgctctgacgacgttattgctgccttttatcggcgcactggtcgtttcgttttcgccacaacgtcgggccgccgaatggggggttttgttcgccgcgctgaccacgctgtgcatgttgtcactgatctccgcgttttatcaggccgataaagttgccgtcacgttgacgttggtcaacgtgggggatgtggcgttgtttggcctggtcattgatcgcgtgagtacgctgattctgtttgtggtggtgtttctcggtttgctggtcacgatctactccacgggttatctgacggataaaaatcgcgaacacccgcataacggcacgaatcgttattacgcatttttactggtgtttatcggcgcgatggcgggactggtactctcctcgacgctgctcggtcagttgttgttttttgaaattacaggcggctgctcctgggcgttgatcagttattaccagagcgataaagcgcagcgttcagcactaaaagcgttacttatcactcatatcggctcgttggggttgtatcttgccgccgccacgctgtttttgcagaccggaacgtttgcgcttagcgcgatgagcgagttacacggcgacgcacgttatctggtttatggcggcatcctgtttgccgcgtgggggaaatcggcccagctaccgatgcaagcgtggctaccggacgcaatggaagcgccaacaccgatcagcgcctatctccacgccgcatcgatggtgaaagtgggcgtttacatttttgcccgcgctattatcgacggcggcaatatcccgcatgtgattggcggcgttggcatggtcatggcactggtcaccattctttatggctttctgatgtatttgccacagcaggatatgaagcggttgctagcctggtcgaccatcactcaacttggctggatgttcttcggcttgtcgctctccatcttcggctcgcggctggcgctggagggcagcatcgcctacatcgtcaaccacgcgttcgctaaaagcctgtttttccttgtagcaggtgcgctgagttacagctgcggcacgcgcttgttgccgcgtctgcgtggcgtattgcacaccctgccgttgccaggcgtgggtttctgcgtggcagcgctggcgattaccggcgtgccgccgttcaacggcttcttcagtaaattcccgctgtttgctgccggttttgcgttgtcagtggagtactggatcctgctgcccgccatgattcttctgatgattgaatcggtcgccagtttcgcctggtttattcgctggtttggtcgcgttgtgcctggcaaaccgagcgaggccgtcgccgatgccgcaccgctgccaggatcaatgcgcctggtgttgattgtactgattgtgatgtcgctgatttccagcgtaatcgccgcgacctggttgcagtaaggagatgatgaatgaccggttctatgatcgtaaataatctggcgggactgatgatgctgacatcgctgtttgtgattagcgtcaaaagctatcgcctgtcatgcggattttacgcctgccagtcactggtgctggtgtctattttcgccactctctcgtgcctgttcgccgcagagcaactgctgatctggtccgccagcgcctttatcaccaaagtgctgctggtaccgttaatcatgacttacgctgcacgaaatattccccagaacatcccggaaaaagcgttattcggtccggcaatgatggcactgctcgcggcgttaattgtcctgctttgcgcatttgtcgttcagcccgtgaagctaccgatggctaccgggctgaaaccggcgctggcggtagcgttaggtcattttctgcttggcctgctgtgcattgtcagccagcgcaatatcctgcggcaaatttttggttactgcctgatggaaaacggctcccatctggtgctggcgcttcttgcctggcgagcaccggaactggtggaaataggtatcgctaccgacgccatcttcgccgtcattgtgatggtgttactggcaagaaaaatatggcgtacccacggcacgctggacgtgaacaacttgaccgcgctgaagggataatgagatgagttattctgtgatgttcgctttactcctgctcacgccgctgcttttttcgctgctctgttttgcctgccggaaacggagactttctgcgactcgcacggtgaccgtattacatagcttagggatcacactgctgctgattctggcactctgggtggtccaaactgccgctgatgcaggagaaatattcgctgcgggactgtggcttcatattgatggtctgggcggtttgttcctcgccattcttggtgtgattggctttctcaccggtatttactcgattggctacatgcgtcatgaagtggcacacggcgagctttcacccgttacgctgtgcgattactacggtttcttccatctgtttttgttcaccatgctgctggttgttaccagcaataacctgattgtgatgtgggcggcgatcgaagccaccaccttaagctcggcgtttctggtaggcatttacggtcagcgttcatcgctggaagctgcatggaagtacatcattatttgtactgttggtgtcgcttttggtctgttcggtaccgtgctggtatacgccaacgccgccagcgttatgccgcaggcagaaatggcgatattctggagcgaggttcttaagcaatcgtccttgcttgacccaacattaatgctgttggcctttgtgtttttgctaattggctttggtaccaaaaccgggctatttcccatgcacgcctggctgccggatgctcacagtgaagcgccgagtccggtcagcgccctgctctccgccgtattgctgaactgcgcgctgttggtgctgattcgctattacatcattatttgccaagccatcggcagcgatttccccaaccggttgttgctcatcttcggcatgttgtcggttgccgtggcggcatttttcattctggtacagcgggacattaagcgtctgctggcgtactccagcgtggagaacatggggctggtcgcggtggagctaggcattggcgggccgctgggaatttttgccgcgctgctgcacatcttaaaccacagtctggcaaaaacgctgctgttctgcggttccggcaatgtactgctcaagtacggcacgcgcgatctcaacgtcgtctgtgggatgctcaaaatcatgccatttaccgccgtgctgtttggcggcggtgcgctggcgctggcagggatgccgcccttcaacatttttcttagcgaatttatgaccattaccgccggactggcacgtaatcacctgctgattatcgtcctgctgttattgctgttaacgctggtgctggcgggcctggtacggatggctgcgcgggtgttaatggcgaaaccgccgcaggccgttaaccggggtgatctcggctggttgaccacctcgccaatggtgattctgctggtcatgatgctggcgatgggaacgcatattccacaacctgtcatcaggatcctggcgggcgcttccactatagtcctctcagggacgcacgatctgcctgcacaacgtagcacctggcatgattttttgccttcaggcaccgcatctgtttcggagaaacacagtgaacgttaattcatcgtcaaatcgtggcgaagcgattctcgccgccctgaaaacgcagttccccggcgcggtgctggatgaagagcgacaaacgcctgaacaggtcaccattacggtgaaaatcaatctgctgcctgacgttgtacagtatctttattatcaacatgatggctggcttccggtcctgtttggcaacgacgagcggacacttaacggtcattacgcggtttattatgccctttcaatggaaggggccgaaaaatgctggattgtggtgaaggcgctggtcgatgccgacagtcgggagtttccgtcagtcacaccgcgcgtccctgccgcggtctggggcgagcgagaaattcgcgatatgtacgggctgattccggttggcctgccggatcagcgtcgcctggtgttgcccgatgactggccggaagatatgcatccgctgcgcaaagatgcgatggattatcgactgcgccctgaaccgacgactgattccgaaacgtatccgtttatcaatgagggcaacagcgatgcgcgggtgatccctgtcggcccgctgcatatcacctccgatgaaccgggtcacttccgcttgtttgtggatggcgagcaaattgtcgatgctgattaccgcctgttttatgtccatcgcggcatggagaaactggcagaaacgcggatgggctacaacgaagtgaccttcttatcggaccgcgtgtgtgggatttgcggttttgcccacagtgtggcctataccaattcggttgaaaatgcactggggattgaggtgccgcaacgagcacatactattcgctcgattctgctggaagtcgaacggctacacagtcatttgcttaaccttggcctctcctgccatttcgttggttttgataccggctttatgcaatttttccgcgtgcgggaaaagtcgatgacgatggcggaattgctgatcgggtcgcgtaaaacctacggtctgaatctgattggtggtgttcgccgcgatattctcaaagagcaacgtctgcaaacgctgaaactggtgcgcgagatgcgcgccgacgtgtcggagctggtagagatgctgcttgctacgccgaatatggaacaacgcactcagggcattggcattctcgaccgacaaatcgcccgtgatttgcgctttgatcacccctacgccgactacggcaatattccaaaaacactgtttacctttaccggcggcgatgttttctcccgcgtgatggtccgtgtcaaagagacgtttgattcgctggcaatgctggaatttgccctcgacaacatgccggataccccactgctgaccgaaggctttagctataaacctcacgcattcgcgctgggctttgttgaagcgccacgcggtgaagacgtgcactggagcatgctcggtgataaccaaaaattgttccgctggcgctgccgtgccgccacctacgccaactggccggtgttgcgttacatgctgcgcggcaataccgtttctgacgcaccgctgattatcggtagccttgatccctgctactcctgtaccgaccgtgtgacgctggtagatgtgcgcaagcgccagtcaaaaaccgtgccgtataaagagatcgaacgctacggcattgatcgtaaccgttcgccgctgaagtaaggacagaagatgctgaagttactgaaaactattatgcgcgccggaaccgcgacggtgaaatatcccttcgcgccactggaggtcagccctggctttcgcggaaaaccggacctgatgcccagccaatgtattgcctgcggtgcctgcgcctgtgcttgtccggcaaatgcgctgactatccagaccgacgaccagcaaaattcgcgcacctggcagctctatctggggcgttgtatttactgcggacgttgtgaagaagtgtgcccgaccagagccatccagcttaccaataactttgaactgaccgtcaccaataaagccgatctctatacccgcgcgacgttccatctacaacgttgcagccgttgcgaacgcccgtttgccccgcaaaaaaccatcgcactggctgctgaattgttagcacagcaacaaaatgcgccacaaaaccgcgaaatgttgtgggcgcaagcgagcgtctgcccggaatgcaaacaacgcgcgacgctgatcaacgacgatacagatgtactgctggtggctaaggagcagctatgagtccagtgcttacacaacatgtcagccagcccatcacgctggacgagcaaacgcaaaagatgaagcggcatttgctacaggatatccgtcgctcggcttacgtttatcgcgtcgattgcggcggctgcaacgcctgtgaaatcgaaatttttgctgccattacaccagtattcgacgcagaacgttttggcattaaggttgtttcatcaccgcgtcacgccgatattttgttatttactggcgcagtcacccgggcgatgcgtatgcctgcacttcgggcgtatgagtctgcccccgatcataaaatttgtgtttcctacggcgcgtgcggtgtcggcggcggtattttccacgatctctacagcgtctggggcggtagcgacaccattgtccccattgatgtttggatccccggctgcccgccaacaccggccgccaccattcacggtttcgccgtggcgctcggtttgctgcaacagaagattcacgctgtggattatcgcgatcccaccggggtgactatgcaaccgttgtggccgcagatcccgccatcacagcgtatcgccattgagcgagaagcgcggcggctggcgggctatcgtcaggggcgagaaatttgcgatcggctcctgcgccatttaagcgacgatcctacaggaaatcgggttaacacctggttgcgcgatgccgacgatccacgtctcaatagtatcgttcagcaactctttcgcgtactccggggggttacatgactgaagagtgcggggaaattgttttctggacgctgcgaaaaaagtttgtcgccagtagcgacgagatgccggaacacagctctcaggtaatgtattactcgctagctatcggccatcacgttggcgtgattgattgtctgaatgtcgccttccgctgcccactgacggaatacgaagattggcttgcactggtcgaagaggagcaagcccgacgtaagatgctgggggtgatgacttttggtgagattgttattgacgccagccacaccgccctgttgacccgggcattcgcgccactggcggatgacgcgacgtctgtgtggcaggcgcgtagcattcaattcattcatctgttggatgaaattgtgcaggaaccggccatctatctgatggccagaaaaattgcgtgagaaggatttctcattaataaggactgttgatggctatgtcagacgaggcgatgtttgccccgccacaaggaataacaattgaagcggtaaacggaatgctcgcggagcggttagcacagaaacacggcaaggcgtctttattacgcgccttcatcccgctgccgccgccgttcagcccggtacaacttattgaactgcatgttctcaaaagcaacttctattaccgctaccatgatgatggcagcgatgtgacggcaacaacagagtatcagggcgagatggtcgattattcgcgtcacgccgtccttctcggcagtagtggaatggcggagctacgctttattcgcacccacggcagtcgttttacttcccaggattgcacactgtttaactggctggcgcggataatcaccccggttctgcaatcatggctcaatgatgaagaacagcaggtggcgctgcgtttgctggagaaagatcgcgatcatcatcgggtactggttgatattactaatgcagtgctgtcacatcttgatctcgacgatctgatcgctgacgtcgctcgtgagatccatcattttttcggtctggcttcagtcagtatggtactgggcgatcatcgaaagaacgagaagttcagcctgtggtgcagcgatctttctgcctcacattgtgcgtgtctgccacgctgtatgcctggcgaaagtgtattgctgacacaaacgctacaaacccgacaaccgaccttgacgcaccgtgcagatgatctgtttctctggcaacgcgacccgttattactcttacttgcatctaacggctgcgaatctgcgctccttataccgcttacctttggcaaccatacaccgggtgcattgttgctggcgcatacctcttccactctctttagtgaggaaaactgccagctactacaacacatagccgatcgcatcgctattgccgttggcaatgccgatgcctggcgtagcatgaccgatttgcaggaaagtttgcagcaagaaaaccaccagcttagcgagcagctcctttcgaatctgggcatcggtgacattatctatcaaagccaggcaatggaagacctgctccagcaggtagatattgtggcgaagagcgacagtacggtgttgatttgtggtgaaaccggaactggcaaagaggtgatcgccagagcgatccatcaacttagcccgcgacgcgacaagccgctggtcaaaatcaactgcgctgccatccccgccagtcttctggaaagtgagttattcggtcatgacaaaggggcgtttactggtgcgattaatacccatcgtggtcgttttgaaattgccgatggcggcacgttgtttctcgatgaaattggcgatctgccgttagaacttcagcctaaactgctgcgcgtattgcaggagcgggagattgagcgtctcggcgggagtagaacgatcccggtgaatgtcagagtcattgccgccaccaaccgtgatttgtggcaaatggttgaagatcgccagtttcgcagcgatctcttttatcgcctgaatgtcttcccactggaattgccgccgctacgcgaccgtccggaagatatccctcttttagcaaaacatttcacgcaaaaaatggcgcgccatatgaatcgcgcaattgacgccatcccgaccgaggcactacgccagttgatgtcgtgggattggccgggcaacgtgcgcgagctggaaaacgtgattgagcgggcggtactgttgactcgtggtaacagtctgaatttacatctaaatgtccgacaaagccgtttactgccgacgctaaatgaagattcagcgcttcgcagttcaatggcgcagttactgcacccgacgacgccagagaatgacgaagaagaacgtcagcgcattgttcaggtattgcgagaaaccaatggcattgttgccgggccccgtggcgcagcgacgcgattagggatgaagcgcaccacgctgctgtcacgaatgcagcggctggggatctcggttcgcgaggtgttgtaatctgcttttgcaggagtatgcatgagaaacaaactctctttcgacttgcagttgagcgccagaaaagcggcaatcgctgaacggattgccgcccataaaattgcccgcagtaaagtgtcggtctttttaatggcgatgtccgctggcgtgtttatggcgatcggatttactttttacctttccgttatcgccgatgccccgtcttcacaggcattaacccatctggtgggcggcctttgctttacactcggctttattttgctggcggtttgcggcaccagcctgttcacctcgtcggtaatgacggtgatggcaaaaagtcggggcgttattagttggcgaacttggctgattaacgcacttctggtggcctgcggtaatctggcaggtattgcctgtttcagtttgttaatctggttttccgggctggtgatgagtgaaaacgcgatgtggggagtcgcggttttacactgcgccgagggcaaaatgcatcatacatttactgaatctgtcagcctcggcattatgtgcaatctgatggtttgcctggcgctgtggatgagttattgcgggcgttcgttatgcgacaaaatcgtcgccatgattttgcccatcaccctgtttgtcgccagtggctttgagcactgtatcgccaatttgtttgtgattccgttcgccattgccattcgccatttcgcccctccccccttctggcagctggcgcacagtagcgcagacaattttccggcactgacggtcagccattttattaccgccaatctgctcccggtgatgctgggtaatattatcggcggtgcggtgctggtgagtatgtgttatcgggctatttatttacgtcaggaaccctgaaaaatcagcccggcgaaacagttcgtcgggctgaagattattcttgcgcgatttgcccatcgggccaggcatgaatcacggctttgatcagcgtcgccaacggaatggcgaagaatacgccccagaatccccacaaaccaccgaagatcaccaccgataaaataatcaccagcggatgcaggttaaccgcttcggagaacaacaccggcactaacaggttgccgtccagcgcctgaataatcagatacaccgcgaagcagctccagaattcagtacctgcgccaaactggaatagcgccacgccaaccaccggaatggtcaccacaaatgcgccaatgtacggaataagaaccgagaagccgaccagcactgccagcagcagcgaatagttcagcccgaagagcaagaaccccagccaggtggcgatccccaccacgatcatctccagcactttgccgcggatatagttggtgatttgttgattcatctccttccacacctgtcctgccagcccacggttacgcggcagcacccggcgaacggcgttcagcatctgctctttgtctttcagcaggaagaagaccatcaatggcaccagcaccagatagacggctatggtcagcaaaccgaccagcgaggcgagggaaattttcaccaccgaatcgcccatggtcagcatccgactgcgcatattttcggccattgcatcaataatgcccgcgtccattaacgccggatagcggcgcggcaacgtggcggcaaagtcagaaagcttattgagcatccccggcatatcgcggattaagtagatgccctgttgccaggcgataggcagtaccacgaacgccatcagtagcaatataccgacgaaaaccaccaatacaatcgacgtcgcccagcggcgggagcagccaatagattgcagacgcacggttggccattccagcaaataggccagcacaatagccaccagcaacggagcaagcaggccactaaagaaaaagataatgccaaatccggcaactaaaataaccagcaaggcaatcgcttccgggtcgctaaaacggcggcgataccattgcatcaacatttcgagcataaagaccttccctgaacctcaagagcgggattgcgatccgcaattgtatcgaaatgtcacaaaaaagacttcgctttttatgacggattcaggaaactgaaaagtcatttgagtgggctaatcttcgccgttacactcaaaggcggcgcggtgggaacgatatttcacagtatcggtcaaatgactatctccagaaatacaggatagaggttatgttcaggcagttgaaaaaaaacctggttgcaaccctcattgctgctatgaccattggtcaggtagccccggcgtttgccgacagcgcagacaccttgccggatatgggaacctccgcaggaagcacgctttccattggtcaggaaatgcagatgggcgactattatgtccgccagctacgcggcagcgcgccgttaattaatgacccgctgttaacgcaatatattaattcgctggggatgcgtctggtttcgcatgccaattcggttaagacaccgtttcatttttttctgatcaacaacgacgaaattaacgcctttgctttctttggcggcaacgtggtgctgcactctgccctgttccgttattccgataacgaaagtcaactggcttcagttatggcgcacgaaatctcccacgtcacccaacgtcacctggcgcgagcgatggaagatcagcagcgcagcgcgccgctgacctgggtcggcgcgttaggttctattttactggcgatggccagtccgcaggcggggatggcggcgctgaccggtacactggcgggaacgcgtcaggggatgatcagtttcacccagcaaaatgaacaggaagcggaccgcattggtattcaggtgctgcaacgctcgggattcgatccgcaggcgatgccaaccttcctcgaaaaattactcgatcaggcgcgttactcctcgcgcccgccggaaattttattgactcacccgttgccggaaagtcgtctggcagatgcccgcaaccgtgctaatcagatgcgcccgatggtggtgcagtcgtcggaagatttctatctggcgaaagcgcgcacactggggatgtataattccggacgtaaccagctcaccagtgatttgctggatgaatgggcgaaaggaaacgttcgtcagcaacgagcagcacaatatggtcgtgctttacaggcgatggaagccaataaatacgacgaggcgcgtaaaacgctgcaaccgttactggcggcagaacctggcaacgcatggtatctcgatctggctactgatatcgatcttgggcaaaacaaagccaatgaggcgatcaatcgtctgaaaaatgcccgcgatttacgcaccaatccggtgttgcagctcaacctggcgaacgcttatttgcaaggcggtcaaccacaagaagcggccaatattctgaatcgctacacctttaataataaagatgacagcaacggctgggatttgctggcacaggcggaagccgcgctaaataaccgcgatcaggagctggctgcgcgagcagaaggttatgcgctcgccggacgactcgatcaggccatttcgctgttgagtagcgccagttcgcaggtgaaattaggcagcctgcaacaagcgcgttacgatgcgcgcatcgaccagttgcgccagctgcaggaacgctttaagccttataccaagatgtaattcgcattaaaggaagaacaatgaccaaacaggtaaaaatctaccataacccacgctgttcaaagagccgggaaacgctgaacctgctgaaagaaaacggcgtggagccagaagtggtgctctaccttgagacacccgccgatgcggcaacgctgcgcgatttgctgaaaatactggggatgaatagcgcccgtgaattgatgcgccagaaagaggatctttataaagaactgaacctggctgacagttcgcttagcgaagaggcgctgattcaggcaatggtggataatccgaagctgatggagcgcccgattgtggtcgcgaatggcaaagcgcggattggtcgtccaccggagcaggtactggaaatcgtgggttaagatgtgctccatcgctagttgaagcacattgccggatgcgacgcttgccacgtcttatccggcctacgaatactatggattaacttcgcgtagttcggataaggcgttcgcgccgcatccgacaataaacaccttatctacaacttcagaatttctttcacaaacggaatggtcagcttacgttgcgcggtaatcgacgcacgatccaactgatccaacgtcataaatagcgtgcgcatttctctgtcgagccgcttcagcaagaaacgccccacatcttccggcagttcaaaaccacgcaaacgcgcgcgtaactgtagcgcctgcaacttatcttcatcagaaagtggctgcaatttgtagatctgcccccagtcgagtcgcgacgcgagatccggtaatcccagattcaactgccgcggtggacgatcgccggtgatcaacaaccgtgttttgcccgattccagaattcgattgtagagatcgaaaatcgccatctcccacaactcatcgcctgcaatacactcaatgttgtcgatacagaccagcgacaaatgctccataccgtcgagcacttccggaacaaaccaggtgcgtttatccagcgggacatagcccaccgcatcgccacgctgcgacaattccgcgcaagccgcgtgcagcagatggctgcgccccgcgccttcgcgtgcccagagatagatgtaaccgctatgttcctgacgcagcacgttttgcagcgcggccagtaaagaggagttatcccccggccagaaacttgcaaaggtttcgtcgtcaggaagataaagtggcaaagagagctgtgccggtgtgttcagagatacctcaaccaggatttcacaaaatcgcgagaagtttaccacagaatcccatgatgtttgaaccgggcagcaacactgcccggtcggtacattatttgtctgttatatccgcgtcttctgcgtccagcaccacttcttcagggcgcagcacactgatcagtttgaagatcaaacttaagccgataccgacgatggtcgccagcgccataccttttaactccgccgcgccgatgtttaccttcgcgccactgacgccgatgatcaaaatcacggaagtcaggatcaggttctgtgctttgttgtaatccactttcgattcgatcaaaacacgaataccggaagcaccgatgacaccataaagcagcagcgaaacgccgcccatcaccggcaatgggatcatctggatagcggcagccagtttaccgacgcaggaaagcaggatagcgaaaatcgccgccccgccgataacccaggtactgtaaacacgggtgatcgccatcacgccaatgttttctccgtaagtagtatttggcgtagagccaaagaagccggaaatcacggtcgacaagccattagcaaacatcgaacggtgcagacctggatcgcgcagcagatcttttttgacgatattagccgttactaccaggtgccctacgtgttcggcaataaccactaacgccgctggcagaatagtcagaatggcaaaccactcgaagcgcggcgtatagagggttggcagcgcaaaccagtgagcattaataatcggcgtggtatcgacaattcccattgcgaaagagagcgcgtaccccaccagcacgccaattaaaatcgggataattgccaggaaaccacgaaacagcacggaacctaaaaccgtgaccgccagggtggtaatagagatgatgatggttttggagtctggcgtttgcccttcagccgggagtaaacccgccataccggcagctacgcccgccagctccagaccgatgacggcaacgattgcgcccattgccgcaggtggaaacagcacgtccagccagccggtccccgctttcttcacgataaaagaaaccaggcagaacagcacgccgcacataataaagccgcccagcgcgacttcataccctaacggcaacagtaacaataccggtgaaataaaggcaaagctggaaccaagataagccggaattttccctttacagatgaagagatacagcagcgttccaataccgttaaataacagtacagtcgccgggttaatatgaaataagacgggcaccaggacggttgcaccaaacatggcgaacaaatgttgcaaactaagcgggattgtctgtaaaagtggcggtctttcactcaccccgatagcacggcgcgtcatagtattatcctctgtattatgtgttataggcgctttactcaaaaaaaagccgactcttaaagtcggctttaattatttttattctttatttcgtaccaaagattttgtcaccggcatcgccgaggcccggaataatgtatccgtgctcgttcagtccctgatcaatcgatgcggtatacagttcgacgtccgggtgcgctttttccagcgcagcgataccttctggcgcagctaccagcaccagaactttgatgctgctgcagcccgcttttttcagcaggtcgatggtcgcgataacggaaccaccggttgccagcattgggtcaacgatcagcgccatacgctcatcgatgttagaaaccagtttctggaagtacggtaccggctccagcgtttcttcattacggtacataccgacaacgctgatgcgcgcgctcggaacgttttccagcacaccgtccatcataccaagacccgcacgcagaattggcacaacggtaattttcttacctttgatctggtcgatttctaccgggccgttccagccttcgatagttactttttccgtttcgaggtcggcggtcgcttcgtaagtcagcaggctacccacttcggaagcgagttcgcgaaagcgcttggtgctgatatcttgctcacgcatcagtcccagcttgtgtttgacgagtgggtgtttgacttccacgatcttcatactctttctcctttgaggggcagccacaaaaaaaatcgacggattatacctcctttcttcaaggcggcaatattcttttcgttgactttagtcaaaatgataacggtttgagataaagttattttatattcagatggttatgaaagaagattattccatccgaaaactaacctttaccctggcacaagtcttctttcgccgcgcgcctggggaaaagacgtgcaaaaaggttgtgtaaagcagtctcgcaaacgtttgctttccctgttagaattgcgccgaattttatttttctaccgcaagtaacgcgtggggacccaagcagtgaccgataaaacctctcttagctacaaagatgccggtgttgatattgacgcgggtaatgctctggttggaagaatcaaaggcgtagtgaagaaaacgcgtcgtccggaagtgatgggcggtctgggcggcttcggtgcgctgtgtgcattgccgcaaaaatatcgtgaacccgtgctggtttctggcactgacggcgtaggtaccaagctgcgtctggcaatggacttaaaacgtcacgacaccattggtattgatctggtcgccatgtgcgttaatgacctggtggtgcaaggtgcagagccgctgtttttcctcgactattacgcaaccggaaaactggatgttgataccgcttcagcggtgatcagcggcattgcggaaggttgtctgcaatcaggctgttcactggtgggtggcgaaacggcagaaatgccggggatgtatcacggtgaggattacgatgtcgcgggtttctgcgttggcgtggtagaaaaatcagaaatcatcgacggctctaaagtcagcgacggcgatgtgctgattgcactcggttccagcggtccacactcgaacggctattcgctggtgcgcaaaattcttgaagtcagcggttgtgatccgcaaaccaccgaacttgatggtaagccattagccgatcatctgctggcaccgacccgcatttacgtgaagtcagtgctggagttgattgaaaaggtcgatgtgcatgccattgcgcacctgaccggcggcggcttctgggaaaacattccgcgcgtattgccagataatactcaggcagtgattgatgaatcttcctggcagtggccggaagtgttcaactggctgcaaacggcaggtaacgttgagcaccatgaaatgtatcgcaccttcaactgcggcgtcgggatgattattgccctgcctgctccggaagtggacaaagccctcgccctgctcaatgccaacggtgaaaacgcgtggaaaatcggtatcatcaaagcctctgattccgaacaacgcgtggttatcgaataatgaatattgtggtgcttatttccggcaacggaagtaatttacaggcaattattgacgcctgtaaaaccaacaaaattaaaggcaccgtacgggcagttttcagcaataaggccgacgcgttcggccttgaacgcgcccgccaggcgggtattgcaacgcatacgctcatcgccagcgcgtttgacagtcgtgaagcctatgaccgggagttgattcatgaaatcgacatgtacgcacccgatgtggtcgtgctggctggttttatgcgcattctcagcccggcgtttgtctcccactatgccgggcgtttgctgaacattcacccttctctgctgccgaaatatcccggattacacacccatcgtcaggcgctggaaaatggcgatgaagagcacggtacatcggtgcatttcgtcaccgatgaactggacggtggcccggttattttacaggcgaaagtcccggtatttgctggtgattcggaagatgacatcaccgcccgcgtgcaaacccaggaacacgccatttatccactggtgattagctggtttgccgatggtcgtctgaaaatgcacgaaaacgccgcgtggctggatggtcaacgtctgccgccgcagggctacgctgccgacgagtaatacccccgtaattaaagcgccagctctgccgctggcgtttttcaattcacctgtaaatcgcaagctccagcagtttttttcccccttttctggcatagttggacatctgccaatattgctcgccataatatccaggcagtgtcccgtgaataaaacggagtaaaagtggtaatgggtcaggaaaagctatacatcgaaaaagagctcagttggttatcgttcaatgaacgcgtgcttcaggaagcggcggacaaatctaacccgctgattgaaaggatgcgtttcctggggatctattccaataaccttgatgagttctataaagtccgcttcgctgaactgaagcgacgcatcattattagcgaagaacaaggctccaactctcattcccgccatttactgggcaaaattcagtcccgggtgctgaaagccgatcaggaattcgacggcctctacaacgagctattgctggagatggcgcgcaaccagatcttcctgattaatgaacgccagctctccgtcaatcaacaaaactggctgcgtcattattttaagcagtatctgcgtcagcacattacgccgattttaatcaatcctgacactgacttagtgcagttcctgaaagatgattacacctatctggcggtggaaattatccgtggcgataccatccgttacgcgctgctggagatcccatcagataaagtgccgcgctttgtgaatttaccgccagaagcgccgcgtcgacgcaagccgatgattcttctggataacattctgcgttactgccttgatgatattttcaaaggcttctttgattatgacgcgctgaatgcctattcaatgaagatgacccgcgatgccgaatacgatttagtgcatgagatggaagccagcctgatggagttgatgtcttccagtctcaagcagcgtttaactgctgagccggtgcgttttgtttatcagcgcgatatgcccaatgcgctggttgaagtgttacgcgaaaaactgactatttcccgctacgactccatcgtccccggcggtcgttatcataattttaaagactttattaatttccccaatgtcggcaaagccaatctggtgaacaaaccactgccgcgtttacgccatatttggtttgataaagcccagttccgcaatggttttgatgccattcgcgaacgcgatgtgttgctctattatccttatcacacctttgagcatgtgctggaactgctgcgtcaggcttcgttcgacccgagcgtactggcgattaaaattaacatttaccgcgtggcgaaagattcacgcatcatcgactcgatgatccacgccgcacataacggtaagaaagtcaccgtggtggttgagttacaggcgcgtttcgacgaagaagccaacattcactgggcgaagcgcctgaccgaagcaggcgtgcacgttatcttctctgcgccggggctgaaaattcacgccaaactgttcctgatttcacgtaaagaaaacggtgaagtggtgcgttatgcacacatcgggaccgggaactttaacgaaaaaaccgcgcgtctttatactgactattcgttgctgaccgccgatgcgcgcatcaccaacgaagtacggcgggtatttaactttattgaaaacccataccgtccggtgacatttgattatttaatggtatcgccgcaaaactcccgccgcctattgtatgaaatggtggaccgcgagatcgccaacgcgcagcaagggctgcccagtggtatcaccctgaagctaaataaccttgtcgataaaggcctggttgatcgtctgtatgcggcctccagctccggcgtaccggttaatctgctggttcgcggaatgtgttcgctgatccccaatctggaaggcattagcgacaacattcgtgccatcagtattgttgaccgttaccttgaacatgaccgggtttatatttttgaaaatggcggcgataaaaaggtctacctttcttccgccgactggatgacgcgcaatattgattatcgtattgaagtggcgacgccgctgctcgatccgcgcctgaagcagcgggtactggacatcatcgacatattgttcagcgatacggtcaaagcacgttatatcgataaagaactcagtaatcgctacgttccccgcggcaatcgccgcaaagtacgggcgcagttggcgatttatgactacatcaaatcactcgaacaacctgaataaccctatgccaatacacgataaatcccctcgtccgcaggagtttgctgcggtcgatcttggttcaaacagttttcacatggtcatagcccgtgtggtagatggtgccatgcagattattggccgcctgaaacagcgggtgcatctggcggacggcctggggccagataatatgttgagtgaagaggcaatgacgcgcggtttaaactgtctgtcgctgtttgccgaacggctacaagggttttctcctgccagcgtctgtatagttggtacccatacgctgcgtcaggcgctgaacgccactgactttctgaaacgcgcggaaaaggtcattccctacccgattgaaattatttccggtaatgaagaagcccgtctgatttttatgggcgtggaacatacccaaccggaaaaaggtcgcaaactggttattgatattggcggcggatctacggaactggtgattggtgaaaatttcgaacctattctcgttgaaagccgccggatgggttgtgtcagctttgcccagctttattttcctggcggggtcatcaataaagagaattttcagcgcgctcgcatggcggcagcacaaaaactggaaactttaacctggcaattccgtattcagggctggaacgttgcaatgggcgcttccggtaccataaaagccgcccatgaagtgttaatggaaatgggcgagaaagacgggataattaccccggaacgtctggaaaaactggtaaaagaagttttacgtcaccgtaatttcgcatcgctgagtttaccgggtctttccgaagagcggaaaacagtcttcgttccgggactggcgattttatgcggtgtgtttgatgctttagccatccgtgaactgcgcctttctgacggggcgttacgcgaaggcgtactgtatgaaatggaaggacgtttccgtcatcaggatgtgcgtagtcgcaccgccagcagcctcgccaaccagtatcacatcgacagcgaacaggcccgacgggtgctggataccactatgcaaatgtacgaacagtggcgggaacagcaaccgaagctggcgcatccgcaactggaggcgctactgcgatgggccgccatgctgcatgaggtcgggttgaatatcaaccacagcggtttgcatcgccactccgcttatattctgcaaaacagtgacttgccgggttttaatcaggaacagcagctgatgatggcgacactggtgcgctatcaccgtaaagcgattaagctcgacgatctaccgcgctttaccttgtttaagaagaaacagttcctgccactgatacagctattgcgccttggcgtattactcaacaatcaacgtcaggcaaccaccacaccgccaacattgacgctgattactgatgacagtcactggacactgcgtttcccgcatgactggtttagtcagaatgcgctggtactgcttgatctggaaaaggagcaagaatactgggaaggcgtggctggctggcggttgaaaattgaagaagaaagtacaccagaaatcgccgcttaatactttgcgggccgacgagaaatgtcggcccgcattattcaggcactttcgcgaatgggttcgatttcattcagcgtatcaattaacggctgcggcttaccaataagataaccctgcatataatcgatccccaaagagagcaccgcctcgcggatctcttcgttttcaacgtactctgccactaccagcattttcttcattcgcgccaggtggcaaatcgatgccactatctgataatccagactatttgacacaatattgcggataaaactgccgtcaattttaagcagatcggcattcacatttttaagccgcgcatagctggcgtagccggtgccgaaatcatcaatcgcaatctggcagcctaattcctgaagatgctgcaaggtgatttgcgcctgcttaacattggtcagagcattactttcggtgacttcaaaaataagttgccacgcttcaatctgatatttagccagcaactgactgacttcaacaggaaaacgagcctgacataccgaggttggagacagattaatagcaaaacggtgagcgggcatcttcgctctgttttcagccataaattgcagcgtatgctcaatgacccacatgtcgatactcgacgataaaccaaattcgtgcgcgaccggcaagaagctatcggggctgatcagttcatcattctcacctttcatgcgcagaagaatttcatggtaaacatcaccacgcataccggtaatcggctgggccatcaggaaaaaatggttgtgttccagcgcctgctgtagtcgattcatcatcgcgactttatctttcaattcgcgttgcaaatacattgccccgcgacgctgcatattttccggggcgttggtcacgatggaaagttcggcgaccgtatttagctctcccagcagcaggtagatatgattcactggcgagcgcacatagcagtaactgacgccaatctgcggttgcatcggcatgccatcccaaaagaaacgaaattgcttgagatggctatccagtgcggtaatgcgctcctggtgcgattctgtattcagtcgcagcgcgagatcgttacccgaaagctgataaacatcttcacccggttccagcaagggtgacagccagtgagaaagtttttgcttgtattgaatccgcagcatgatgccatagttcttaaccagcatttccatgccagggatgcgtaaataacaaagcgcagaccagggggcatcacgcaacgcgcgattcagggcgcgaacatttggcagatgaaccaccgggtccacatacgcaagccgctgaatgcgtctgactaccgctctctgacgggttgccagtacagccatataattgacaataaaagagaataccagataactggaggaggttatggtcagctgcgtggtatagccaggataaatgggaatgtaattttgatagctgtggatgctgatcatcaacacgaccgcccagagcagcgaaatcagcttataaccatagcgcatcgctccccacatcatcaggggcagcaataatgacaaggtataattggtgctaaaaattgtgcttttttcatttaacggcatgcataacagcaacaataaagcacctaatgccagtagccagagcgcgaactcttttttggtgactttggcatcaacctgctgttttaattgcgaataatagctacgtaaataaaatggatttcgcactacccgaatgatgaagtagcacagcgggacaccgatcagattacccaccagtaaggcctgataattgattaaagtcccgaggttaaaaggcatgacaccgaccagattttctctgctcgccagtaatcctacaaatgcagcaaactggaaaagtatcagaaacagcgttgcaggaaacacaatctgccagaatatacgctgggaaattaaacgggtatcaccatgtgaaacgttgttacgccggggagtaaagaccctgtaaccgccccaacagagaatgataatgataataaaattagccgttaatgatagcgtttcgtaaaaacccagctctgcatatttgcggacaaaaatccctaaggcgatccctggcaatgccgcccagctgaaaaacatcatcatgctgatcatcagtgccagaggcagataaaagagaaaaacctcaccggaagaaatatgcgcgaaagtattaatgtgggcgaaaatgggcaagattaaagaaggcaggaacagcggaagcccccaccatttatcacgtatttttatataagttgcattcagtttcatagatgctcagcagaatcccccacatcctgaaggaggtgtattcagacaggcatcccacctgacttcgaatgatgattattcatcactatagagagcattgattctaagtgtcatatgaaagtaccaattgatatatatcaaacaaaataaccctgattaatgaattattacgtttatcatgttaattcatcattattacatcatcattgtaaataattaaattaacttccataacattaaaatatgtatccactgacgcttttttacataacgaagaattgaccattttgtcctgttgtgccttaatgtaagtaccgtccacagcgtgggacatacttcaaggaaccttttgtgagtcaggcaaccagtatgcgaaaacgacaccgatttaacagtcgcatgacccgtatcgtactgctcatcagctttatcttcttctttggccgttttatctactcgtccgtcggtgcctggcagcaccatcagagcaaaaaagaagctcagcaatccacactctccgtcgaatcaccggtacaacgttagcggttaccttctccactttcacagaacataacggcacttcgctgtcggatgcttttgctgtttgggattatcaaagcggcagatattctttcatcttaaattttacgtctttatcctgactgatgtttatcctgtttggctgcgaaataaatataaaattaatatatatgttgtaatgatatatttttataaattattccctgcgtgaattttaataaatttaatctatccctttatacgcaatacatttactttcctcttttgatgatcttaaatgtcttatttttcgtaatgtgtataacaaggaatagtgatgaaatttaaaaaatgtcttctgcctgtggcaatgttagcgtcattcactctggcaggatgccagtcaaatgctgacgatcatgctgccgatgtttatcaaaccgatcaactgaataccaaacaagaaactaaaaccgttaatattatttccattcttcccgcaaaagttgccgtagacaactcccaaaataaacggaacgcacaagccttcggcgcgcttattggcgcagtcgctggcggtgttatcggccacaacgtcgggtctggcagcaattccggaacgacggcaggtgcagttggcggcggagctgtaggcgcggcagcgggttctatggtgaatgataaaaccttagtggaaggtgtttctttaacctataaggaaggcaccaaagtgtatacctctacccaggtgggtaaagagtgccagtttacgacaggtttagccgttgttattaccacgacgtataacgaaacgcgtattcagccaaataccaaatgtcctgaaaagagctaataatcaggaggagtcatgaagaaagtttttctttgcgccatcttagcctccttaagctatccggctatcgcctcatcattgcaggatcaactctctgctgtcgcagaagcggaacagcaaggtaaaaatgaagagcaaaggcagcatgacgaatgggtcgcggagcgcaacagggaaatccagcaagagaagcaacgtcgcgcaaatgcccaggccgccgctaacaaaagagcggcaacggcagcggcaaataagaaagctcgtcaggataaactggacgccgaagcctctgcggacaaaaaacgcgatcaaagttatgaagatgagctacgcagcttagagattcagaaacaaaaactggcgctggcgaaagaagaagcccgcgttaagcgagaaaacgaatttatcgatcaggaactgaagcacaaagctgcgcaaaccgatgtggtgcaatctgaagctgacgccaacagaaatatgactgaaggcggtcgcgatctgatgaaaagcgtgggcaaagcagaagagaacaaatcggacagctggtttaattaatcgatgttagtaacttcaatcctataattcttgaagataaaaaaccctctgtagtaacagagggttttgttcattcatagtgcagggtcaaatcattcccactcaatggtagctggcggcttgccgctgatgtcatacaccacgcgggaaataccgttcacttcattgataatgcggttggaaacgcgaccgaggaaatcgtacggcagatgcgcccagtgtgcggtcataaagtcgatggtttcgacagcacgcagagagacaacccagtcatacttacgaccatcgcccattacgccaacggaacgtaccggcaggaacacagtgaacgcctggctgactttgtcgtacaggtccgctttacgcagttcttcaatgaagatggcgtcagcacggcgcagcaggtcacagtactctttcttcacttcacccagaacacgaacgccaaggcctggtcccgggaacgggtgacggtacagcatgtcgtacggcaggcccagctccagaccaatcttacgcacttcgtctttgaacagctctttcagcggttcaaccaggcccatcttcatctctttcggcaggccgcccacgttgtggtgagatttgatgacgtgtgctttaccggttgcagacgccgcagattcgataacgtcagggtagatggtgccctgcgccagccacttcacgtcttccagtttcagcgcttcttcatcgaatacttcaacgaaaacgcgaccgatgattttacgttttgcttccggatcgttttcgccagccagcgctgacaggaagcgatcttctgccggtacgtgaacaatgttaagaccaaagtgatcgccaaacatatccagaacctgctctgcttcgttgaggcgcagcaggccgttgtcgacgaatacgcaagtcaggtttttaccgatagcgcggtgcagcagcattgcggttacggaggaatccacaccaccagagaggccgaggatgactttatcgtcgcctacctgctcgcggatgcgagctacagcatcgtcgataattttcgctggcgtccacagggcttcacactggcagatatcacgcacaaaacgctccagcatgcgcataccctggcgggtatgagtcacttccgggtggaactgtacgccatagaagcgtttttcttcgttagccataatggcaaacgggcagctttcggtgctggctacggtgatgaagtcggacggaatagcggtaactttatcgccgtggctcatccagacatcgagcagcggtttaccgtctgcggtcagcgcatcttcgataccgcgaaccagtgcgctgtcgtttacgacttcaacctgcgcgtagccaaattcacgttcgttagaggcttcaacgtgaccgcccaactgcattgccatggtctgcatgccatagcaaacgccgaataccggtacgcctgcttcaaagacatactgcggcgcacgcggactgttttcttcagtagtactttccgggccgccggaaagaataatgccgcttggattgaagtcacgaatttgtgcttctgtcacatcccacgcccacagttcgcagtaaacacccagctcacgcacgcggcgcgcaaccagttgagtgtactgagaaccgaagtccagaatgaggatgcgatgcttatgaatgttttccgtcattgacgcttattccgaggcaagtgaaacagataatataaatcgcccgacatgaagtcgggcgaagagaatcaggagcccagacggtagttcggggactctttagtaatggtcacgtcgtgaacgtggctttcctgaatgcccgcaccgctgatacgtacaaactccgctttagtacgcagttcgtcgatagtaccacagccggtcagacccatacaggagcgcaggccgcccatctgctggtgaatgatctctttcaggcgacctttataggctacgcgaccttcgataccttccggcaccagtttgtcggcagcgttatcgctctggaaataacggtcagaggaacctttggacatcgcgcccagggaacccataccacggtaagatttgtaagaacggccctggtagagttcgatttcacccggagattcttcagtacccgccagcatggaacctaccatcaccgcgcttgcgccagcggcgatagctttggcgatgtcgccggagaagcgaataccgccatcagcgataaccggaataccggtgccttccagggcttctactgcgtcagcaacagcggtaatctgcggaacaccgacgccagtcacgatacgagttgtacagatagagccagggccaatgccgactttaaccgcactgcaaccagcttctgccagagcgcgtgcacctgcagctgttgccacgttgccgccgataatttgcagatccggatatttagcacgggtttcacggatacgttgcagtacaccttctgagtgaccgtgggaggagtcgatcagcagaacgtcaacgcctgcggcaaccagcgcgtcaacacgctcttcgttacccgcacctgcgccaaccgctgcaccaacacgcagacggccttgctcgtctttacaggcgttcggtttacgttccgctttctggaagtctttcacggtgatcatgccgatcaggtggaattcgtcatcaaccaccagcgctttttcaacgcgtttttcgtgcatttttgccagcaccacttcacgggcttcaccttcacgcacggtgaccagacgctctttcggcgtcatgtaaacgctaaccggctggttcaggtcggtaacaaaacgcacgtcacgaccggtgataatacccaccagttcgttttcttcggtaacgaccggatagcccgcaaaaccgttacgctcggtcagttctttcacttcgcgcagcgtcgtggttggcagaacagtctgcggatcagtcaccacaccagattcgtgttttttcacacggcgaacttcttctgcctggcgttcaatggacatgtttttgtggataaagccgataccgccttcctgagccagagcaatagccaggcgcgcttccgttacggtatccattgctgcggaaagcatagggatattcagacgaatagttttcgtcagctgggtgctgaggtcagcagtattcggcagaacggtagagtgagcaggaacgaggagaacgtcgtcaaacgtcagagcttctttagcgatacgtagcatgggcaatatctcgaccagagtggttaataaatattgccgcggcattatacagagcgtaaccgattgcatctacccctttttgcaaaaaatgcttgctatccccgaagggcgggttactatcgactgaataacctgctgatttagaatttgatctcgctcacatgttaccttctcaatcccctgcaatttttaccgttagtcgcctgaatcaaacggttcgtctgctgcttgagcatgagatgggacaggtttggatcagcggcgaaatttctaatttcacgcaaccagcttccggtcactggtactttacactcaaagacgacaccgcccaggtacgctgcgcgatgttccgcaacagcaaccgccgggtgaccttccgcccacagcatgggcaacaagttttagttcgcgccaatattacgctctacgagccgcgcggcgactaccagataatcgttgagagtatgcagccggccggtgaagggctgctgcaacagaagtacgaacagctcaaagcgaagttgcaggctgaaggtttgttcgatcagcaatacaaaaaaccacttccctcccctgcgcattgcgttggtgtgatcacctcaaaaaccggtgctgcgctacatgatattttgcatgtgttaaaacgtcgcgatccttctctgccggtgatcatctaccctgccgccgttcagggcgatgacgcgccggggcaaattgttcgcgccattgaactggcgaatcagcgcaatgagtgcgacgtattgatcgtcgggcgcggcggcggttcgctggaagatttatggagttttaacgacgaacgcgtagcgcgggcgatttttaccagccgcattccggttgtcagcgccgtcgggcatgagacggatgtgaccattgccgattttgttgccgatctgcgtgcgccaacgccgtctgccgccgctgaagtagtgagccgtaatcagcaagagttactgcgccaggtgcaatcgacccgtcaacggctggagatggcgatggattattatctcgccaaccgcacacgtcgctttacgcaaattcatcaccgattacagcaacagcatccgcagctccggctggcacgccagcaaaccatgcttgagcgcctgcaaaagcgaatgagctttgcgctggaaaatcaacttaagcgtaccgggcaacagcagcagcggttaacacagcggctgaatcagcaaaatccacagccgaagattcatcgcgcgcaaacgcgcattcagcaactggaatatcgtttagcagaaaccctgcgcgcacagcttagcgccacgcgtgaacgtttcggtaatgcagtaacgcacctcgaagccgtaagcccactgtcaacgctggcgcgtggatacagcgttactactgctactgacggcaatgtactgaaaaaagtgaagcaagttaaagcgggtgaaatgctaaccacacgtctggaagacggctggatagaaagtgaagtaaaaaacatccagccagtaaaaaaatcgcgtaaaaaggtgcattaagccagcacgaattcaacgcgttttttcgatatcaagccatgcccgtgctgacagaagtaatctactgcaccacaggcttttaacacctgcaacggttgatggcagtctggacaaagagctttcatttcaataaattccccgcaggatcggcaacgcgcatggccgttatcctgatcaagcacatgctgacattgtggacaatgcagttccatatgaattcctccggtagccattccctctacattcatagagggaatggcagataaaatacttacggataattatttatttttcttgatgtgcttcatcagacgcttacgtttacgcatctgggttggcgtcagggtgttacgcttattcgcatacgggttttccccttctttgaactgaatacgaatcggcgatcccattacgtccagcgatttgcggaagtagttcatcaagtagcgcttgtaggaatcaggcaggtctttcacctgattaccgtgaatcaccacaatcggcgggttataaccaccggcgtgggcatatttcagcttcacacgacgaccgcgtaccagcggcggttggtgatcttcaacagccatcgtcatgatgcgcgtcagcatagaggtccccacacgacgggtggagctgtcatacgcttcacgtactgattcaaacaagttaccaacaccactgccgtgcaaggcagagataaagtgcacacgagcaaaatcgataaagcccagacggaagtccagcgtttctttcacctgctctttcacttcctgactcaggccatcccacttattcaccacaatgacaagtgagcgcccactattgagaataaagcccagcagcgagagatcctgatcggaaataccttcgcgcgcatcaatcactaacatcaccacgttggcgtcttcaatggcctgcaacgttttgattacggagaatttctctacagcatcggtgattttgccgcgtttacgtacgccagcggtgtcaatgagcacatactcacgtccatcgcgttccattgggatgtagatgctgtcacgcgtcgtgccaggcatgtcgtaaacaacaacgcgctcttcaccaagaatacggttagtgagtgtagacttacctacgttcggacgacccacaatcgccagtttgatcggcagactttgcgggtcgaagtcgtcttcctcttcttcttcgccgttctcttccgcttcaaattgcgcccagtattcagcgtcttcgtcgacttcctcttgcggtgcgagatcttccatccacggcagcagcacatgctccagcagacttaatacgccacgaccgtgagacgcggcgatcgggtagatttcacctaaaccaagcgagtagaaatcaaccactgcctgatcgggatccagaccgtcagttttgtttgccaccaggaaggtcggtttttcacgggagcgcagatgtttggcaatcgcttcatctgccggcatcaggcccgcgcgcgcatccaccataaacagtacgacgtccgcttcttcaatcgccagcagcgactgttccgccatgcgggtttctacaccgtcttctgtgccatcaatcccgccggtatcaatacagataaactcacggccttcaatttccgcacgaccgtacttacggtcacgagtcagacccgggaaatccgcaaccagcgcatctcgggtgcgagttagacggttaaataacgtggattttcctacgttagggcgcccgacaagcgcgaccacaggtaccatgtttaaagcctcatttttataaatcatcagacaacgcacgctatattcgcgtcgttgttaaaaacaggaaaacggcccctgtccaggagccgttttcaaagtgaacgacagagacgattaacgtgtaatagagtacacggttccgtcttttgcctggatcagcagtttgccgtcagcggcaaccggttcagtctggaaaccggaactatcaactttttgctgggcaacgaaacgaccatcttcgacgttaatccagtgcagataaccttcactgtcaccgaccaccaggttgccattatacagcaccggagaagtcagcaggcgatgcagcagatcgctttgtgtccacagcgtaacgccgccatcaatggtcaacgccatcacccggtcattttgatcgaccagatagatgcgattgccgtcgacgatgaaatcattcaccgaacccagttcgcgtttccacataatctgaccactgcgcagatcaagcgccgtcaggttaccattataggccagcgcgaaaacaacgccgttaacaacgacgggagtcgtgtcaacatcgctcagacggtcaatttcggtagaaccggtcgcctgggaaatacgctgctgccaaatcatctggccctgttccatcagcactgcgctgacgcgaccattatcgccccccacgacggccgcaccaaaagccgttgtcggcgcagactcgccacgcaaagagagcgaaggcatatcgaggttaactgtccatttgacagcgccgtcagcttcgttcagcgcttgtaactgaccgttactggtgtggattaacaccagaccgtcgctgaccaccgggcgcgaaagtgcttcacccgcgactttagtttgccatgccacagtaccatcgctggtattcagcgcgtaaacctgcgccttttcgctgccaatgtagacatgcccaccagacacggtcacaccgccagaaagtaatgcaggctctttagagaaccagccatctttctcggccaggctgacagaccagatttctttgccatcatccgcattcagcgcttttactaaaccagcgcggtccgctgcatagacaacgttgtccgccagtgccggatgaagattggaatagaagttgccaatgccgctaccaacggaagtgctccacgccgtggtcggcgtaaactggttttcaacggttggcaatggggacatctttaccacatcttcttcgctgttaaacagcgaacagccgcttaaaagggtaacggaaagcagtcctggcagcagtaatttacgcaattgcatcgggtccctctcagatggacaaattattaattttcatctgcatcatttcgctcagtgccggagtaacatcgcttttcacgcctgcttcccatgcactacgcgcaccttgcttatcacctttgctcagcaatgcttcaccacgcaggtcggcaacaatggcagcccacccttcacctttgatggtatcaagggttttcagcgcggcatcagcctgcttgagctgtacctgaacgcgagcaagacgcagatttatcacggctttgagattttcatcgctcgtgtctgccagcccctgttgtaactgggcggcagctttctctagttcatttttgtcaacaaattgctgcgcaagttccaaagaagccagcgcaccataagtatttttattttcagcagcaaatttttccgccgccgggatgctatccggtttgccttcgctcactgcggtaaccgcattttgataggcaagagaagcggagcgtgcagaatcaacctgatggctgttccagtagcgccagccaatcagtgcgccaacgcccaaaatcaccccaacagccagtgctttgccattttcagcaaaaaagcgtttaaccgcttctacctggtcgttttcgttctcgtaaatttccacgctgtccttctccttccttaacccagtaacgtgcgcaaatgcgcggctacgctatcctgcgcaactgccgtttgctcaccagagcgcaaatccttcactactgctgtgccgttagccacttcagactcacccagcaccacagcaacgcgggcaccccatttatcagcacgggcaaactgtttcttaaagttgccgccgccgtggttggtcatcaatttcacgcccggtaattcatcacgcagacgctcagctaatgccatagccgcagattgtgtatcagcacctgaagccaccaggtatatatcgacaacaggatcggctttaaattccggattaacggcctgtactaacaatacaagacgttcgaggcccatagcaaaaccgacagccggtgttgcacgaccgcccagttgttccacaagaccgtcataacgaccgcctgcacacacggtgccctgggagccgagactgttagtcacccactcgaaaacggtacggttgtagtaatccagaccacgcaccagacgctggtttacggtgtaagcgatccccgcgctctccagcagtttgcacagaccggcaaaatgctcacgagattcctcgtccagatagtcacctaatgccggagcgtcgttgagaagcgcctgcacttccggattttttgaatccagcacgcgcagcgggttagtgtacatgcggcgtttgcagtcttcgtccagcttttctttatgctgctcaaggaatgccaccagcgcatcgcggtaattggcgcgtgcttccagcgaaccgatagagttcagctcaagagttacgtgctcggaaatacccagcgcgcgccaccagcgggcagtgagcataatcagttcagcgtcgatatccggaccttgcagaccgaaaacttcgcagcccaactgatggaactgacgataacgccctttctgcggacgctcgtgacggaacatcggcccgatataccacagacgctgttcctgattgtacagaagaccatgctcgatgccggcgcgtacacagcccgccgtcccttcagggcgcagagtcaggctgtcgccattgcgatcctcaaaggtgtacatctctttttcaaccacgtcggtgacttcaccaatcgcacgtttgaatagcggggtctgctctacaatcggcaagcggatttcactgtaaccgtagctgccgagcacgtttttcagtgtgccttcaatgcgctgccagatggccgtttcgccaggcaggtaatcgttcatgccgcgaatggcttgaatgttttttgccacgtttattctctttctgaatataaaaatgaaccctcaacgcttccctcaatgtttcgggagccatgcgggttcaatcatacacgggaagcgaggcgcttcccatcacgttattatttttcaacctgctgaacgtcaattcgacgcgcttcgtccagctgactggctttcgcacgaatgcgtgcttccagctggtcgatcatatcgttgttgtccagacggtctttgcgcacgccatcttcatagaggccgcttttcttgttgccgccggtgacgccgagtgtagaaaccagcgcctcacctgggccattcaccacgcagccgataatcgaaacgtccatcggagtgatgatatcttccaggcgttgctccagcgcgttaaccgtaccgataacatcaaattcctgacgcgaacaggtcgggcaggcgatgaagttgatccctcgcgaacggatacgcagcgatttcaaaatatcgaaaccgactttgatctcttcgaccggatcggccgccagcgatacgcgcagcgtgtcgccgatgccttcagacagcagcagacctaaaccaatggcggattttactgccccgctgcgcgcaccaccggcttcggtgatccccagatgcaacggctgatcgatctgttttgccagcaaacgataagactcaacagcgaggaagacgtcagacgctttcacgctgactttgaactgatcgaagttcaggcgatcgagatgatcaacatgacgcatggcagattccagcaacgcctgcggcgtcggttcgccatacttttcttgcagatctttttccagcgatccggcgttaacgccaatacggatcggaatgtttttatcgcgcgcacagtcaaccaccatgcgaatacgctcttcattaccgatattgccagggttaatacgcagacaatcgacgccgtattccgctactttcagcgcaatgcgatagtcgaagtggatgtcagccaccagcggcacgttaacctgctgtttgatgagtttgaacgcttctgccgcgtccatcgtcggtacggatacacggacgatatcagcgccaacgcgttccagcgccttgatttgattgaccgttgcttcgacgtctgtcgtacgcgtattggtcatggactgtacggcgatgggagcaccatcgccaatcggcacattcccaacgtaaatacgtgttgattttctacgttgaattggagcctggttatgcatgaaaaatctcccgcgttacccgtctgttactgcgccggtgattgttcggcattgagggtcagacgcgcaacctggttagttctgataaaacgactcagatcgacaggtttcccttgatactggatctgtactgcggctggcgcaccaattttcagtttgtacggtgcctggccggttaagttcaaattaccgtctttacgctgcataccgctaaacaattttttaccggtagcatcagtgacctccagccagcaatcggcagtaaagttcatcaccagcgcattcggatcagccaccggcgtggtcacgccagcctgatcggttggcaacggcgcagcaccatctggcgttgttgctgccgttggtgccggggtcgcggcggtatcaacatttgcctgcgaaggcgaaacaaccgcattctgttgcggatcaacagctggtgctggcgcagttacggcaggtgtttgcgtgttggttgcggtagtatccacagacgctggcggcgtggacgttgtagccgggtctgtagttgtcgacgtatttaatggaacactctgcccctgctcgctattactgctcagttccgccgaagattgatcggccatagtggtgatctcttcctgctgagctttgcggtcttgccaccaccaggcaccgctcaggccgataaccacaaacaacaccagccaagtgaaggtcatcagccagccgtcgcgttttttgcggcgtttaccgagggaaaaactctgcatcggcgcaacttttgcagcccgaagtggagcctgcttttccagccctggcagcagttcttcttctggaatatgtaccagacgcgcataagagcggatatatccgcgcaggaatgttgaagcaagatcggcgggtgccttatcttcttcaatgtcgcgtaccgtggaaaccttcaggcaaagtcgctcggcaacggcctgctgactaagtcctagttgttcgcgagcattacgcaggcgagcgccggtagtaagtgcttcattttggtcgtgcgtggcttcagtattcattcgctgcaggtacgtttaaatgagaattgagatgccggtgaaccatcatgctcacccacaccgcgaaacatccgttaagttaaccgttatcatacagtataagaccgtctgtgtgctcgtgacaaagcccacattcactaaggctaacttactgttgcatcgttacatactgccttaaagtcagcaaaaacgcaccgttaatattgaccagacaattgcaacttaatacttcattcataaaacattacgccacggtacataaagtaaccgtggcgtaatggctatcagaccgctttaatgtcgatggcttcaccctgcatccgtttacgcagggtacgtttcgtacggtcgataacatcgcccgccaactgaccacaggcagcatcgatatcatcaccacgagttttacgcacaatagtggtgaaaccgtagctcatcagcacttttgagaaacggtcgatacggctgttcgagctgcgtccatacggcgcacccgggaacgggttccacgggatcaggttgatcttacacggcgtatctttcagcagttccgccagttggtgcgcgtgttcagtgccgtcgttaacgtggtcaagcatcacgtattcaatagtgactcggccctgattggcgttggatttctccagataacggcgcaccgcagcaaggaacgtttcgatattgtactttttgttgatcggcacaatttcgtcacgaatttcgtcgttcggcgcgtgcagggaaattgccagtgcaacgtcgatcatatcgcccagtttatccagcgccggaactacaccggaagtggaaagcgtgacgcgacgtttagacaggccaaaaccgaaatcatcaagcatgatttccatcgccggaacgacgttgttcaggttgagcagcggctcgcccatgcccatcatcactacgttagtgatcggacgctgaccggtgacttttgctgcgccgacgattttcgccgcacgccacacctggccgataatttccgacacccgcaggttgcggttaaagccctgctgggcggtggaacagaatttacactccagcgcacaccccacctgcgaagagacgcagagcgtggcacggtcgtcttccgggatatacaccgtttcgacgcgctgatcgccaacggcgatcgcccatttaatggtgccgtcagatgaacgctgttcttcaaccacttccggtgcgcggatttccgccacctctttcagtttgccgcgcaacactttgttgatgtcggtcatctcatcaaagttgtcgcagcaatagtgatacatccacttcatcacctgatcggcgcggaagggtttttcacctaaatctttaaaaaactcccgcatctgctgacggttgagatccagcaggttgatttttccatctttcgtggtgacgttttcaggtgtgactaattgttcagacatatgctattccggcctcgttattacacgttatggcccctggagggttgaaaaaagaaacgccccggtgagcggctgctcgtccgggggcgctgcattgtacaaattctggcgcacggatgccacgtttgcacgcggcatttacgaaattattaacgggtgcgcgggcacacttcgccttcgccaaagaaataagcgatttcgcgagcggcagattcgacggaatcagaaccgtgggtaccgttttcggtcaggctgtcagcgtaatcagcgcgcagagtaccagccagtgcgtttgccggattggtcgcgcccagcagatcgcggtgacgctgaacggcgttttcaccttccagcacggaaaccacgatcgggccagaggtcatgaattcaaccagaccatcaaagaacggttttccatcgtgttcagcataaaagccacgtgcctgttcaacggtcaggtgcagcattttggtgccaacaattttgaaccctgcagcttcaaagcgcgcaaagatattaccaatgacgttttttgctaccgcgttcggtttgatgatggaaaaagtacgttcaatagccatttttacctctgtaaattgttctgttgttgtctgtaccagcgtacgagatggcgcggattataatgagcaacagggccgttgactattgatgaaggtaacatttttttaaaataaaatgagttttagcaacaatcagggacaaaacagactattgcatgacaaatttcactgtcgcgatttgccccacgtcatccatcaccagcaattgataatcacctttatccgtcaaatgcagggtcacgttgcgcccgcgttcagttaacggttcgccattcagaaaccaccagcgttcacctgcccctccacttgattgcaacggcaaagtcgcttccgctgcgcccggtaaacgtttaataatcgcgccatcgcgaacgcctgtcagctgcagcgggagctgggcatcgtgaccgtatggcgggcaacttgtcgaggccggtggtaagcgcacagcgcgacgttctgatgcgggcagccagggttccagcggtagcggccagacatttatcatttcttgtcgcgcttgcgggcaatcagcggcaacacgtttgccattttcatccagccagatggggaaacgaatgccattaatgccttcctgctccggcagtaatagagttggcggctgactcccgtccagcagccaggttgccaggcggcggcgacagttaccgtcaccttccggcaaagactgtccgcccggccagcagataacgccacgagtgactgagttcgggcgcgggtcttccggcagattcgcactgcgcgacagtaagatattattgacctgattcaacaatggtacggcactggcaaagccaaactgaccaacaacgggcgtgccgtccggtctgccagtccagatcccaatgacatagcgagcgttaaccccaatcgcccaggcgtcacgatagccatagctggtgcccgttttccatgccagtggggcgacgcgcggcaaggcactatccggcaagggttgcgcttcatcagccataatccggcgaatgatccacgccgcccccgacgacattaaaggccgttcaagcagcggatcgtcaggctgtaagcgcaatttgcctgccttgccgtggcgagcaaacgcggtatacgctgccgccatatcttccagttttgcaccagcgccgccgagaatgagtgaaagattcggcgcagcaccgttgggcaaatataacggcaatccaacattgcgtaactttgccgcaaaccgtttcggtccataggcttccagcacctgcacagcaggtaagttcagcgagcgcaccagcgcctcgctcatgctgatcgggccatgaaaaccgctatcaaagttacctggtcgataatcaccggtgcgccgggggacgtcttgcagcagtgatgccgggtggatcaagccttcatccagcgccagaccataaacaaacggtttgagcactgatcctggcgatcggatcgaattgaccatatcaacatgaccaaagcgtgaatcatcgttgagatcaaccgatcccacccagccgcgaacacgcatatcggtatgatcaaccacgatcatcgccagtgagctgcgcggtggcaaccgccctttccagttttgcgccagttcttccagacgtcgttgaagaccggcatccaacgtagtagtgattttgtcgcttttgcttttaccgagcatcatgcgcgaaaacagcggtgccagttgcggcatttgtcggggggccagccagatgggttcttcccttgactcttttacctgctcacgggaccacacaccttgcacggccatccgttcgagcactttattacgcgcggcttcggcacgctccggccaacgatccgggcgaagacggctgggcgcttgcggcaaaaccgccagcattgccgcctcggaatagcttaaattcgcaggcgattttccgagataagcccaacttgccgcaccgatcccctgcaacgtaccgccaaacggagcgcggttaagatacaaggtcagaatttcacgcttagacagatgccattccagttgcaacgcgcgccagagctggcgaattttgccgccaaatgttttggggtgaggatcaagcagacgagcaacctgcatagtgagcgtgctgccaccggaaataacccgtcccgaagtgagatcttgccatgctgcgcgcgccaccgagaatggattcacccccggatgcttccagaaccagcgatcttcataattgatcagcgcttcaaggtaacgtggagaaacatcttcgattgttaccggataacgccagatgccgtcagcatcggcgaagcgccagagcggcgtaccatcctgcgccacgaccactcgtgcgggattgacttcatgcagcggtagaggccagagtttatctgctccccacgctgcaagaaaaaggagaaagggcgcggctgccaacgttatccagcagccgcgtttggttaacaagcgaggcatttacggtctgacaatcagcagatcttcagccgcgccggtcgcccgccattggggaacatacattgattccaccatcggttgcggtacctgatacgttcccggcgtcaccgcccgcgccagatacaccagcgttaccggttggtattcatcaacggcaaccgccgccacaaagcgatcgtcacggaactcaatgtgcttaatgctcgcctgctgcatctggttcagtaagttctgcacttcgccaccactttgctccaggctggcgctaccgttcgccagattctggttttccagttccagacccgcaggcagcagatccacgactaacgcatccggcacgctgttactggcttttacctgcaaccacaccagcaccagatcgccgctacgtaacgagtccagcgatttgctcttaccatcagtaccaagaatatgacgctcgatttgcagcacattgttcgccggtaaaggtgcggattgcggataaccgctggcatccatacgcaaccataacggctgatcgccactgttgctcacctgcaaggtgacaagttgatcgctattcagattgctgttttgcgctttctcgcctgtcagctgctcagctgagaaagaggtttgcgcctgccatttaccgggtaaatcctgaatcgtacgggcagccaggaacaacgcgttactttcctgcgtcgatagccagcgttcaccaaacgcctgctgcgaaagtgtgttcagcaaagtgtactgctcatcgggtagcagtttattttcttccagcaaggagagcattaacgcgttgtcgcgcagtgaactaccgtaatcacccagccatatccgctcatcactattacgcggcgttttcagcgccagcgcaatcgcttcttcaccacgcgtcgcatcacccatggttttcagcgcaacgccaagttgcagcagcggtaaaccagaagcggcatctgcacgatgctcccagatttcacgcagcgcacccagcggagccttttgctgacgggccaacaccagcgcagcgtaagactgtacggcgaatttactggctttgagattatccgcgtacgggatcgacatcatgcccggatcttgtaaatagcgcagcagacgctcattaccccggttaatggcgtctgtcggcacgctgtaaccctgttcgcctgcgcggaccaggaaatccatcacgtaagccgtcagccagtactcttcgtcaccgtttttatcccacagcgcaaagccgccgttatcacgttgcatttgcagcaaacgggaaatgccgatatcgaccgatgcacggcgtttctcatcactgtcgcctttgatgcccaacgcctgcagttgggctgcgttggtataaagtgacggaaacaggccgctggcggtttgctcaagacagccgtacggatacgcttttaactctttgatataacgtgcgatgttcagcggtggtttgccgctcaacaacaattgcccttccagcgtaacaggcgagaagttttgcaatccatccgccggaatcgcccatgtctcaccaggctgtaacgccgtaccgtaattaaccgtttgtgccgggaacgccggacggacgccgattttccactgcttatgctgatcggcaacggtttcacccggtaacgctaacccgctaatggtggcctgaatttctccatcgccataacccggcaatgctcgcaccgggataaacagcgtagtacgcacacctggcgctaattcaacggctgcgggtgaatcgctgaccagttcaagcaaaccactggcggtcagggcaacgttcagtttttgcggtttatcggtaagattagtgatatccagcgtcagacgcgaggtatcgccactcgccataaagcgcggcatgttcagttcagcaatcaccggtgcggcaactatcactttactttcgttgctaccgaagtcatctgccgtccaggcttgcgccatgacgcgcaattcaccgttaaaatcgccaatcggcagtgtaaccgagccttcgccctgttcgttgagcgttaccggcagcgcctgctgcacgacaatattgacgtgattgaccggcggtttaccaccacgtttcagctcatcaccatcgccaccgaaacgcagagctgccagacgcccctgaccttcaataacctgaccgtaaatatcgtaaatgtctgcgccatagcgtttctgaccaaagaacgcctgccacggatctggcgtgacgtagtcagtaatattcagcacaccactatcaacggcagacaccagcacattcacctgtttaggcttctcgccatttttagtgctggctttaattttcacggttaatggttgattgggacgcatttttgctggtgtttccagcgccagatcgaggcgacggttttcatcgccaagcggcagatgcaacacaccaaccgcgcgttttggcgtcgcggagcgagatttatcgccaggacgtaccaccagcgtacttaaatacagatcatgacgattccaggttttatcgaccggaatcgtcagatccagcccttgagcccgaacatcaatctcttgccaccacagcggcccttcactggactcgaccatcgcataacctttacccgccgttggcgcggcgatatgcaacttaatggtgtcgccagggcgataactggctttatccagtttcagcgtgacacggtcgggtcgcactgcgccgctaccgtcgctgttgtcctgccagctatagccagcccagaaacgaacactactgaccgcttcattcggcgctttgacttccagacgataagcgccccactctaccggaaaactgaccttgccggtttcgtccgctttcagatccagagtttgttcattttcgatcagatctttttgatcaaactgtgactgccagccttcatcttctgaccagttccagtagtaatcgcggcgttcgcgaatcaggcgcacctgcaagcccgacacggcttttttcacgccttgcgcatcgctataaacgatgtcaaaagcggcgttactgccttcatcaacaatgggctgtttcaccgtgctgtcagtacgataatcgtaaaccgatttcgaggcgaactgcggacggatccccggcaatgcatcggcaggccagatagcctgctcagcgcggcgcgtcaccgggcgaccgcccgattccagcaaactaccctggaaaataacctgtaatggggaatgcgtttccttccactggctttctgtagaaacttcgccgcgccctttatcatccagcgtcaactgaacttcatccagcgtgcgggaaagattttcggcagctatatcgccgaattcaaaaccaggtaaggctgacacagcttcacgcagtgggcgcaggaaaagttgcccttgcaaagtattaccattagcaggtgcaccatacaggtagtaccccaccacggagaatttcacttcatctttcggcgttagcggggttttctcaccggtcagattcagcgccatgcgctctggcataaaatcttcgacgtggaaatcccacatccgatactgattatcgcccgtgttagcgcgaatatgccacataccggttgccgcattgctatcgagtggccaggtaaagtggtagaggccattctccggctgactaacgacgctcctgagtacctgcccatcgggtttaatcacgtctaacttgatgggttgattgggcaacgctttaccgtctgcatcacgcagcaaaccattgaggattaccgtttcacctgggcgataaagatcgcgtgggccaaacatgaaaaactgtttgctatagcctggcgcgccagcaatgttaaattctgctaagtccagcgccggaagttttaaatcgagtagcgttgtctgaccgtctttacgcgccaacagtaatgccgcgtttttatcattttccagctgcacatgcccctgagcgtcactggttgcctgagtcagagtctgccctttctcatttaataaagagacttcaattccttgctgggccgcgccgttttccagactttgggtaaagatatccagacgattgtgataacggtgagctgaaacgccgatatcacttaacgtaaacagcgtcgcgggattactgtaatcgtaacgtccagcctgattcatcacagccagatacacgcccgcctgctgaagcggtttgatatcgcccagcggcagcaataatttttcacgggtgttacgcgcaggattgagatcaaaccgtccggtgtagaccagatccgccatctgcagcagtttgtctgactgccagttcgccagcgaattgcggtattcccattggctaatgaatgctggcagagattctggcttaacgcggaagaagttaacatcgacattattaacgttgagcgccattaccggcagcccttcaacgactttgccaggcagcagcgaaccacggctggcaaaaccgacgctgggttggatgtcgcgggtagttatagttttttcgtaatctttactgaaggttgcgttgttgagtgctttgacctccttgccaatagtaacgatcaaatcacgtttcggttcgaggtggcgtaaacgtaactctttaagattatctgacagctcccaggcaccatccactttgccgctttttttatcgacgacatgaataacgcgtgagaaatcctgatccgggtcgagagggatggagaacgtcagcaccagcgtggctgcaccatcaagttggacttcagagagatccagcaatgtcagcaccttaccggcactctgttgggccagtttttgtctctccggcacggagagttttgctgaactcgcgttttctgaagaggccgctttagtaacttcagaaggcgcatcttttttcaccgctgttggcgcgttatcgttgttgtcgcaccctgccagcgccagcattagcatgcaggcggctacgcgtaactttttcatttttcatccctgccacaatggcccgttagcaacgtcgaataattattatgcgtgagaatttacgttatgtaattcagtatcacgcccatacaatccgaattttagtgagaattgtggctcagacagccaaatcagcctcttttgcttgtcgcttttcactaaacatccgacaatttagcctaaccccggcaaaaatggagatgcctatgtccacgacatggtttgtaggagccgactggctcgccgaacatattgatgacccggaaattcagattatcgatgcccgcatggcgtcgcctggacaggaggatcgtaacgttgctcaggagtatctgaatggacatattcccggcgcagtgttttttgatatcgaagcgctttctgatcacacttccccgcttccgcacatgctgccgcgcccggaaacgttcgccgtggcgatgcgtgaattaggcgttaaccaggataagcacctgattgtctatgacgaaggtaatcttttctcagccccacgagcatggtggatgctgcgcacctttggtgtagagaaagtgtcgattctggggggtggacttgcaggctggcagcgcgatgatctgctgttagaagaaggtgcagtagagctgccggaaggagagtttaacgccgcgtttaatcctgaagccgtggtgaaagtaaccgatgtattattggcaagccatgaaaatacggcgcaaattattgatgcccgcccggctgcacgttttaacgcagaagttgatgaacctcgcccaggtttacgtcgcggacatattcccggagcactgaatgttccgtggacggaactggtgcgcgaaggcgaactaaaaacgaccgatgaactggatgcgatattttttggtcgcggcgtcagctacgacaaaccaattatcgtcagctgcggctctggtgtaacggcagccgtggttttgttagcactcgcgacgctggatgtgccaaacgtgaaactgtacgacggcgcatggagtgaatggggcgcgcgggcagatttaccggttgagccagtgaaataagtattttacaggcaataaaaaaccgccgaatttggcggttttttattgctagtctggttcgcggcctttccagcaggttgacttgtgttacatgagcaacgcaggtgcttcacagcaaaacaatactcaccagtaactctctttttgtcaagcaaaagagagtaattattgtttatttagcgtattatcgacaccggccctttccgccgtgttcggtaataaaataacctggcttattagtccgaattcagacaaatataaataaatcctgctcaaaattaaaaattctaaccggtaaaagatattacttaaacatgtaaattcactttcctttaaaaaacaaaaaaccgccaaaatcaggcggttttttgttgctggtccggttcgcggcctttccagcaggttgtattaccgtagtaatgcaagcgcgtctcagcggagacaatactcgccagtaactctctttttgtcaagcaaaagagagttattattgttctgttagtgtattatccactgcggccctttccgccgtctcgcaaacgggcgctggctttaggaaaggatgttccgtggccgtaaatgcaggtgtttcacagcgcttgctatcgcggcaatatcgccagtggtgctgtcgtgatgcggtcttcgcatggaccgcacaatgaagatacggtgcttttgtatcgtacttattgtttctggtgcgctgttaaccgaggtaaataataaccggagtctctccggcgacaatttactggtggttaacaaccttcagagcagcaagtaagcccgaatgccgccctttgggcggcatattttagattatccgattctgtttaaagtcacgcaaaaaaccaccccagcgacgttcatagaatggcgcaatatgttcggtaataaagtggctaattcctttttccccttttttcacctgacaaatatcgattggttcatcgccaggtaatgtatcggtcgctacacttcccgtcgcctgaataatttcttcgatatcaccatcggcttcaatgccaataagtaaattaggctgtgcctcttcgttctctttaattgaacaaataaaagcacgcttcaccggcttaatggttttaaataaggtggtgagtgaatcaatcatttgtgctggcggctctgcgacttccgataatatcagcgattcaccgccttccaggatttcctggctgctcagcggatttccctcttcaccaatcaacaaactgatttcacgcggcataaattctttaccggttggcagtttggcattaaggaagagcgtttcgccaagtgtcatctcaaacagcgtgcgaacgggcattacgacaaatgcctgttcgtcttcaaccgcctgttgaagtgcttctaacgaggtgaaaaaaggaatgacgctggtgccgtcttctttttcccagtgctgtaaatcaagcgcgctatcttcaaccacagcctcgccctgcgccgccgtaccaggcacccagacggtggattccagtagagtacggaaaaaggccgggcggtgcgccggttcagttgctgctttttccagcaggtcttcaagttcgttttttgtttcggacataagaaccacaattcattcaacgttcggggcgcaaatgcctgatgcgctacgcttatcaggcctacaagggattcgcaatttgttgaatttgcagaatttgtaggccggataaggcgtttacgccgcatccggcatattagtttacgccgttaacagattagctatcgtgcgcacaccaagtcccgtagcgcccgcagaccactgttcaaccggcgctttacggtaagtcgccgagcagtcgatatgcagccagccttgctgatagttctcaacaaagtgcgacaggaagcccgccgccgtgctcgcgcctgccggatacgccgcgcttccggtattgttcagttcggcaaagttagacggcagctggctgcggtggaactccgccagcggcagacgccagaacggttcgttctcctgcgcggcactcgccagcaagcgaccggccagcgcatcgtcaaaactgaacagcgcgtgataatcattacccagcgcagttttcgccgccccggtgagggtcgccgcatcaatgatcatttccggtttctgcgcactggcatcaatcagaccatcggcaagcaccagacgcccttcggcatcagtgttcatcacttcaacttttttaccgttgcgataggtgatgatatcgcccagcttgaacgcattgccgctaatcaggttatccgcacagcagaggaacagcttcacgcgcttgttcagtccgcgcgtaatggcaaatgccagcgccccggtaaccgttgccgcgccgcccatgtccgacttcatcgagtccataaacgcagtctgtttgatgctgtagccgccggagtcaaaagtgatacctttacctaccaggcacgcgtacactggcgcttctttatcgccagttgggttgtaatccagcgccagcaataccggagaacgttctgaaccgcgtccgactgtgtgcagccccatataaccttgctcacgcagatcttcgcctttggtgatccgataagtcacacgatcgcccgcgacgttgctgatcagatcaacagcacgctgtgccagttgcgatggtcccaattcttctgccggtgcgttgatggtgtcacgcacccagtcgatgatcatcaggcggttatccagttcctggcgctgggcatcgtccagatccggccacaccactttacgcgtgcctttcggggctttgtaaccttgccagaatgcccagcagcgatccgcatcccagccttcaccgcttaactgaacatgcttgatgcccagaccgtcaatcttgcgcgccgcacgctggatcagccccagatcgtctgccccgttcaaatgcagggtaatgccgtcattattaatgctgtaagttgctttttctccccagcgcgcgtcggcaggttgggtagagagggtaatcttcatcgcttctgtcattttagttatccttctttgtaaaagggccgccagttggcagccccaggatttttccgctaaatgattcgcgttgcaggaaggcggcaagtgagtgaagccccaggagcatagataactatgtgactggggtgaacgagcgcagccaacgcatctgcggcgtgaagcatgacgcggaaattattcggcctcgtccagccagactaacaaaatcgcttcgaggattttctcgttggatgcctgcgggtcgtcgtcgaaatcttccagatcgcaaatccactgatgcatatcggtgaatcgaaccgttttcggatcaagatcgggatacgcatcgtacagtgcttcgccaatttcgcggctatcggtccacttaagtcccatactaacctctgttaatgctcacgcgcatggttgatagtgtaacgcgggatttcgactactaaatcttcgtcggtaacgcgcgcctggcagcttaaacggctttccggctccagtccccaggctttgtccagcatgtcgtcttcctgctctgagctttccggcagtgagtcaaaaccttcacgaacgatgcagtggcaggtggtgcaagcacaggatttttcacaggcgtgttcaatctcgataccgttacgcagagctgcgtcgagaatggtttcaccgctattagcttccagaacagcgccatcagggcagagatcctgatgaggcaaaataacaatctttggcatattaaacctcgtccacggaatggcctttcagcgcacgacgaaccgactggtccatgcggcgagcggcgaaatcctgggtttgtttgtctacgtttttaatcgcttgttcgatggcgtcaacatcatcgccctgcgccacttcactcaggtgagcggcagcatcgtcaatgacctgacgttctgcggcgcttaacagcgcggcatcagcagccagcgcgccgtgcagactttccagcacacgcgccgcttctactttttgttctgccagcattcgggcttttacgtcctgctcggcatagctcattgagtctttgatcatcgaagcgatttcgctatcggtcagaccgtaagacggtttgacctgaatagacgcctcaacgccggtggatttctccatcgccgtcacgctcaaaagaccgtcggcatcgacctggaacgtcacgcgaatatgcgcaccgccagccggtagcgccggaataccacgcagcgcaaaacgcgccagtgagcggcagtcctgcaccagttcgcgctcaccctgcattacatggatagacatcgccgtctgaccatctttaaaggtggtgaaatcctgagcgcgggccaccggaatagtggtattacgcggaatcactttctccaccaggccgcccatcgtttcgaggcccagcgacagtgggatcacatcaagcaacagcatttcgctgtctggcttgttacccaccagaatatccgcctgaatcgccgcgccaatagcgacgactttatccgggtcgatggaagtcagcggtggacgaccgaaaaattcgcctacccgttcacgcaccagcggcacgcgagtagaaccgcccaccatcaccacttccagcacttcatcagcttctacacccgcgtctttcagcgcgcgacgacaagccagtaaggttcgttttaccagtggcgcgatcagttcattgaattgttcacggctgatttcgccctgccagcccgcaacgttaacggtcacggagtccgcatcgctcagcgcgattttggctgcaatggcggcatccagcagttcacgctgaacgcggttatcgctacgatcaggaatgcccgcctgctcgcgaatgtaatccgccagcagatggtcgaaatcatcgccgccgagcgcggaatcaccgccggttgccagcacttcaaacacgccgcgacttaagcgcagaatggaaatatcaaacgtcccgccaccgaggtcataaacggcgatcacgccttcctgaccggaatccagcccgtaggcgatagccgcagcggtcggttcgttaagtaagcgcaggacgtgaaggcccgccagacgcgccgcgtctttggtgccctgacgctgggcatcgtcaaagtacgccggaacggtgataactacaccatccagctcgcctgccagggcttcagttgcccgcgccgccagtgctttgaggatgtccgcagaaacgcgcaccgggttcagcagccccgccgccgtttcaatcatcggcaggccgttttcgctggcctggaattgataaggcagatgcggatagcgttgctggatatcagccagcgagcgtcccatcaggcgtttaacagaactaattgtgttggcggtatcgagcgctgcattagtacgcgcgtcataacccaccgaatgcccttgctgttgatagtgaacaacagatggcagcaggtgacggccttcatgatcggctaacgtttcggcctgaccgctgcgcactgtcgccaccagcgagttggttgtgcccaggtcaataccggccgccagacgacgctgatgcggcgcagcactcaaaccaggttcactaatttgtaataaggccatgtttagcttccagaaattaaaaatcgagcagtttttcttcgagttgttcggcactgcttcgcagtttatcgagaaaacgcagcttacgcacggtatccgccgccgcgtcccacgtctcgttgtctaactgttcaaccatcaactgatggcgggtatcaaacatctttttcacacgtttgataaagctttccagccgcgcttcatctttcgcctgttcgatctcgtccagctcttcgcgcagctccaactgttccatcaggaacgcggtgtcgcgcacagtatgctgctcgctggcgagatcaaagccgtgcaaagaaagcaaatattccgcgcgcattaacggatgacgcagcgtttgccaggcctggttaatggttgcagattgctgtacggcggcgagttgttccgcctggcttccgctggcgaatttatcaggatgatactgacgttgtagatcctgaaaacgcaggctcagcgcctgggtatcgagttgatagcgggcaggcaagccaaagagggtgaagtaatccataacattctcagggctgcgatccgccgcgataacggcgaatcaggtaaaacaaaccccacgcgcaggcgaccacggtggggttatcggtatgcgcatcaaacgtggaagctttcgccgcaaccacactcatctttgacgttcgggttggtgaatttaaacccttcgttcaggccttcttttacgaagtccagctgcgtaccgtccagaaattgcaggctcttgccatcgaccacgactttcacgcctttgtcttcaaacacgatgtcttccggcgtcggttcgtcaacaaattccagtacataagccatacctgaacacccggaggttctcacgcccagacgcaggccaaaccctttaccgcggttagccagaaaggtatttactcgcgctgctgcactgtcgctcagtgtaatcgacataaccaaacctcaactcttattttgcttcacgtttgcttttatagtccgcaatggcggctttgatcgcgtcttctgccagaatagaacagtgaattttcaccggcggcagttcaagttcttcagcaatatcggtgtttttgatcgcctgcgcttcgtcgagagacttccctttcacccattcggtgaccagggagctggaagcgatagcggaaccgcagccgtaagttttaaaacgcgcgtcttcaatgataccttcatcgttgactttaatctgcaacttcatcacgtcgccacaggccggtgcccccaccatgccgctgccgacgttctcgtcgttgttgtcaaaggaacccacgttacgcggattctcgtaatggtcgataactttttcgctgtaagccattataaattctcctgattccgataccgattaatgatgagcccattcgatgctgttcagatccacgccctgcttgtacatttcccacagcggagaaaggtcacgcagacgaccgatggatttacgaactaactcgatggtgtagtcgatctcttcttcagtagtaaaacgacctaaagagaaacggatagagctatgtgccagctcgtcgttcagccccagcgcgcgcagcacgtaggacggttcgaggcttgctgacgtacaggcggaacctgaagaaactgcgaggtctttcagcgccataatcagcgactcaccttcaacgtagttgaagctgacgttgagaatgttcggcgcaccgtgttccaggtcaccgttcaggtaaacttcttcgatatctttgatgccgttccacagacggttacgcaggccgcgcagacgttccatctcggtcgccatctcttcttttgcgatgcgataggcctcgcccattccgacgatctggtgaacaggcagagtgccggaacgcataccgcgctcgtgaccgccgccgtgcatttgcgcttcgatgcgtacgcgcggtttacgacgtacatacagcgcaccgatacctttcgggccatagattttgtgaccggagaaagacatcaggtcaactttcaactggctcaggtcgataggcagtttacccacgctctgggttgcatcaacgtgatagataatgccacgagcacggcacatttcgccgatagccgcgatatcctgcaccacgccgatttcgttatttacgtgcatgatggacacgaggatggtgtcgtcacgcatcgctgcttcaagttctttcaggtcgataatgccgttacgctgcggtgccaggtaggtgacttcaaaaccttcgcgctccagctgacggcaggtatccagtaccgctttgtgttcggttttgctggtgatgatgtgcttgccttttttctgataaaagttggctgcacctttgatcgccaggttgtcagattcggttgcaccagaggtaaagacgatttcacgcggatcagcgccgaccagatcggcaatctgattacgggcgatatctaccgcttcttcagcctgccagccgaaacggtgagaacgggaggccgggttaccaaaggttccgtccatcgtcataaactgcatcattttctcggcaacacgcgggtccaccggcgtggttgcggagtagtcgagataaatcggtaatttcattgctctataaactccgtacatcactcaatgcaaggaatcaggctaccggctggatgtacgaccgtgtttacggagtatttagcactccggcctgattctgaattctttttattaagcgcgtaacttaacgtcgatcgcgtcttgtgtgcgggtgcgtggcgcgtcgtgagtatgctgacgaccagacacatccagcacttcctggttattaaccagttcgcctaaagtaatgttgttgagaaaaccggtgagacggtcgctcaaatcacgccacagcgcgtgggtcaggcatttatcgccgccctggcagccgcctttaccctgacaacgggtggcatctacagattcgtcaacggcgctaattacttcgccaacggcgatgctgctggcatctttgcctaacagataaccaccgcctggtccacgtacgctggaaaccagaccatttttacgcagacgggaaaacagttgttccagataagaaagggaaattccctgacgttcggaaatatcagccaacggtaccgggcccgcttcagagttgagcgcaacgtcaagcattgcggtcacggcatagcgccctttagatgtcagtctcatgtcttacttcacctcaaactcgcccctgcccggggttttttattgtaaaagtgggggtattgcatagcagggtcaagtctgacattcccgagtaaattggtcaactatttacttgactgatttagtcgggtatttaaccttcagtgccatttttttatcgtggcgtttgtacctgttgtcggatgcggcgtgaacgccatatccgccctggggttctgtacactgtaggcctgataagacgcattacgcgtcgcatcaggcaacggctgtcggatgcggcgtgaacgccttatccgacctacggttctgttcactgtaggcctgataagacgcattacgcgtcgcatcaggcaacggctgtcggatgcggcgtgaacgccttatccgacctacggttctgttcactgtaggcctgataagacgcattacgcgtcgcatcaggcaacggctgttattcggccttgttacctttattctgctgctcaatagaagccagaatcccgcgcaggatattcaactcctggctttccgggcgcgcacgggtaaacagacggcgcaatttattcatcacctgccccggatggttttcacggataaaaccggttgccagcagcgtttgttccagatgaccataaaaacgctccagatcatcgaccagcggatacggcgtctcttcatgctcgacctgctcgccgttttcctgagttgccagccaggccatgcgcacttcataggcaataacctgaaccgccatcgccaggttcagcgagctgtattccgggttagccgcaatcgcgacatgataatggcatttctgcaactcttcattggtcaagccgacgcgctcgcgaccaaacaccagcgccaccggggtatttgccgcttcagcgacgcttttcaggccgcattcgcgcgggtcgagcatcggccatggcagcgtgcgggaacgtgcgctggtgcccaccaccaggctacaaccggctaacgcttcgtcgagcgtatcgacgatgtgagcattaccaatcacatcgctggcccctgctgccagggcaatcgcctgggagtcgggtttcaccagtggattaaccagccacagattggttaatcccattgttttcatggcacgggcaacagaacccatattgccggtgtgtgacgtctccaccagcacaattcgaatattttgcagcattgtctttcttcatctaaagattattcacgcatcttatcataaaacgaagacagatgccgatctcgctgctatactctgcgccgttttcccgttctttaacatccagtgagagagaccgatgcatccgatgctgaacatcgccgtgcgcgcagcgcgcaaggcgggtaatttaattgccaaaaactatgaaaccccggacgctgtagaagcgagccagaaaggcagtaacgatttcgtgaccaacgtagataaagctgccgaagcggtgattatcgacacgattcgtaaatcttacccacagcacaccatcatcaccgaagaaagcggtgaacttgaaggtactgatcaggatgttcaatgggttatcgatccactggatggcactaccaactttatcaaacgtctgccgcacttcgcggtatctatcgctgttcgtatcaaaggccgcaccgaagttgctgtggtatacgatcctatgcgtaacgaactgttcaccgccactcgcggtcagggcgcacagctgaacggctaccgactgcgcggcagcaccgctcgcgatctcgacggtactattctggcgaccggcttcccgttcaaagcaaaacagtacgccactacctacatcaacatcgtcggcaaactgttcaacgaatgtgcagacttccgtcgtaccggttctgcggcgctggatctggcttacgtcgctgcgggtcgtgttgacggtttctttgaaatcggtctgcgcccgtgggacttcgccgcaggcgagctgctggttcgtgaagcgggcggcatcgtcagcgacttcaccggtggtcataactacatgctgaccggtaacatcgttgctggtaacccgcgcgttgttaaagccatgctggcgaacatgcgtgacgagttaagcgacgctctgaagcgttaatgactcaggcgggtgatatcactcacccgccctcgcctttcaggcgctattccgaaatacttcctcactgctttactttctttcgtcactctcccaccatctttccccgattaatggatgataaagaagtcgcaaggaaaggttatggcactgccagtgaacaaacgcgttcccaaaattctgtttattctctttgttgttgccttctgcgtttatttagtgccgcgcgttgccatcaacttcttctattatcccgacgataaaatttacggtcccgatccctggtcggcggaatccgtcgaatttacggctaaggacggtactcgtctgcaaggctggtttatcccttcttcgacgggccctgctgacaacgccatcgcaaccatcattcatgctcacggcaatgccggaaatatgtccgcccactggccgctggtcagttggttacccgagcgtaatttcaacgtttttatgtttgattatcgcgggtttggtaaatcaaaaggcacgccgtcccaggccggattgctggacgatacgcaaagtgccatcaatgtggtgcgccatcgcagtgatgtaaacccacaacgtctggtgctgttcgggcagagtattggcggggcgaatattctggatgttattggtcggggtgatcgtgaaggcatacgtgcggtgatcctcgactccacatttgcctcttatgcaaccatcgccaaccaaatgatccccggcagtggctacttacttgatgagagttacagcggcgaaaattatatcgccagcgtcagcccgatcccgcttttactcattcacggtaaagctgatcacgttatcccatggcagcacagcgaaaagttgtatagcctggcaaaagagccaaaacggttgatcctaatcccggatggcgaacacattgatgctttttccgatcgtcacggcgatgtttatcgcgaacagatggtggactttatccttagcgcgttgaatccgcagaactaacccatgatcgctagcacgataatcattcacaaaaccaccttaagacatgctaatccactggtcagaacagtttaagatgagaaaaattctgtgacgcttgccaacatttctgatgattagcattcccttcgccatttccttgagcaaactttagctattcttatcaattatgcttatgggagatctacagatgatgcctacgcttgctccaccatctgtcctttcggctccccagcgccgctgccagatcttgctgacgctctttcagccggggttgaccgccaccatggcaaccttcagcgagcttaatggtgtggatgatgatattgccagtcttgatatcagcgaaacaggacgggagatcctgcgctatcatcaactcacactgacgactggttatgacggtagctaccgggttgaaggtacagtgcttaaccaacgtttgtgtttatttcactggctacgacgtggtttccgtctgtgtccgtcatttattaccagccaattcacccccgccctgaagagtgaactgaagcggcgcggaattgcgcgtaacttttacgacgataccaatctacaagcgttagtgaatctctgctcccgacggctgcaaaaacgctttgaatcgcgcgatattcatttcctgtgtctgtatctgcaatattgtttgctgcagcaccacgctggaattacgcctcagtttaatccgctccaacgtcgctgggcggaatcctgccttgaatttcaggtagcgcaggaaattggacgccactggcagcgtcgggcgctccagcctgtaccacctgatgagccactgtttatggcactacttttttccatgttgcgggttcccgatccattgcgggatgcgcatcagcgggacagacaattgcgtcagtctatcaaacgtctggtaaaccattttcgtgagctgggaaatgttcgtttttatgatgaacaggggttatgtgatcagctttatacccacctcgcccaggcgttaaatcgcagtttgtttgccatcggtattgataataccctgccggaagagttcgccagactgtacccacgcctggtgcgcaccacccgcgcggcgctggccggatttgaaagtgaatacggcgtccatctttctgatgaggaaagtggtctggtcgcggtgattttcggtgcctggctaatgcaggaaaacgatctgcatgaaaaacagattattcttcttaccgggaatgatagcgagcgagaagcgcagattgagcagcagttacgcgaactaacgttactgccgctcaacattaagcatatgtcggtaaaggcatttttgcagacaggcgctccgcgtggcgcggcactgattattcgcgccttataccatgccattaccgctcttttcaccaccgctgatctatacggacctgacgctgacaacacatcaacaggagcagatccgcaaaatgctcgaatcagcatgagggaacaactttcgggcgcaaaaacattgccggaagcgccaccagcgccattacccagaacacgccgtggcccagatattgatacaggaaaccggcgaaaacggtcatgatagcgatactgccgcccatcgcgacggcagagtaaaccgcctgtaaacggatgacttcgctaccctggcgagcagcaatataacgcatggcggccaggtggcagaccgtgaaggtgccgcaatgcagaatttgcaccactatcaaccacggcaacgccgtagttgctcccataatgccccagcgcactacgccgcaaatcgccgagatcaacagcatatcgcgtgcactacaacggcggaaaagtttattactcagcgcaaagataatgacttccgccaccacgcccagcgaccacaaataccccaccgccgaggccgagtagccagctgcctgccagtaaatggcgctaaaaccgtaataggccgcatgtgccccctgcaataaacaaacgcaggccagaaagcgccagttctggcgaaccagcgccaaccacgcagaccaaccggtgctctcctgctggcgacttgccccttgtggctgaatcgtcggacggatgagaaagccgagcagcatggatgccacgcccaacgtcaacagcgcgaggatcacccgataatcaaacatagtgaccagtttgcccgtcagcgccgagccaatgacaaacgccaccgagccccacagtcgcactttgccgtaatcaagcgggaactgcttttgccacgtattcgccagtgcatcggtcaacggtaccagtggtgagaaaaagaggttaaagccaatcatcaccagcatcagccacgctacgtgcgcccccgcccagaaggcgacagcaaagagaagtgtcagcagtgccagcacgcgcaaggcggaaatcaggcgggaaggatcgctgacgcggggcgcgatgagcaaactcccgaggaaacgggcaaccagacctgcccccaataacaggccgatggtttctggcgttaaaccaatccctttaagccagacgctccagaaaggtagaaaaatgccgtaactaaaaaagtatgtgaaatagccgagcgccaaccagcgcgtggattgcaaaaccatgagtccctcccgtcaggaggcgttagtctggggttaatcgaatgttggtgcaagttgaaaaataagaatattcgagcctgcttcccgatgtctgtaacgccagttcacaagcactaaaaaactgagatccgcgacgcatgttgcaaaaataatgcgtaattatgccgttacgcttgccaaacgttcctgcacaatggcgatgaaatcgcgtaatgccggcttcatctcccctttcttccacgccatcagtaaagcaatggaaggcacatttccggcaatgggacgaaaaacaacctgtccggtattaaaattattcatataaccgggtatcaaagtgacgcccagccccatgcccaccagattcatggtcaccagaatattcgttgccacctggacgatatttggctggctgttttcttgcgcaaaccacgctttaacgatcggcgcaagcgaaccggaatacaccggatcggtactgacgaaattcacgccatccagttgcgcggcggtgatctctttttcatgtgctaaagggtgatcaaccggtaacacaaccactaatggttcgtcaaaaagctccagataatcaatctccgggctataaacaggatggcgcattaagccgacgtcgagttcaccacggcgaattttttcctcctgttgcgtggtgattaaactcaccagctcaatcaaggtgtctggctgtctgagacgaaacatcggtaatacttttggcagtaaattcacttccgccgatggcacaaagccaatggttaattgtctgtcttcctgaacaattttccgcgcccgtaatttggcattttccgcttgttcgaggattgccagcgcgtcctggagaaaacattctcccgccgccgtcaacgcgactttgcgcttatccctcaccagtaacggaacaccgacacagttttcaagatcgcggatctggctgcttaacgaaggctgtgaggtatgcagtttttccgccgcacgggtaaagttcagtgcctgcgccactgcgacgaaatagcgtaaatgccgtagttccatcaccttccccttgttatcgaaaaaacgtctcagctggtagaaattaactatttcacatattagcaaccaaccagcaacatccttatggcacaaaaatagaaggtcaatacatcttatctttcaggattaaaaaatatgaccacaccctcagatttgaacatttaccaactgattgacacccaaaatggtcgggtcactccgcgtatttataccgacccggatatttaccaactggagcttgagcgtattttcggtcgttgctggctatttctcgcccacgaaagccagatcccaaaacccggtgatttctttaacacctacatgggagaagatgcggttgtcgtagtgcgtcagaaagacggcagcatcaaggcgtttctcaaccaatgccgccaccgggccatgcgtgtgagttatgcagattgcggcaacactcgcgcctttacctgcccgtatcacggctggtcttatggcattaacggcgagttgatcgatgtaccgctggaacctcgcgcctacccacaagggttgtgtaaatcccactggggactaaacgaagttccttgtgtggagagttataaagggctaatttttggcaactgggataccagcgcaccgggcctgcgtgattacctgggtgacattgcctggtatctggatggcatgctggatcgtcgcgaaggcggcaccgaaattgtcggcggcgtacaaaagtgggtgatcaactgtaactggaaattcccggcagagcagttcgccagtgaccagtatcatgctctgttcagccatgcttctgccgttcaggtattaggggcgaaagatgatggcagcgataagcgcctcggtgatggacaaaccgcccgcccggtgtgggaaaccgccaaagatgcgctgcaatttggtcaggacggtcacggtagcggtttcttctttactgaaaaaccggatgctaatgtctgggtcgatggcgcagtttcaagctattaccgcgaaacctatgccgaagcagaacaacgtttaggtgaagttcgcgccctgcgcctggcgggtcataacaatattttccccacgctttcatggctaaacggcactgccacactccgcgtctggcatccgcgcggccctgatcaagttgaagtgtgggcgttctgtattactgacaaagccgcctccgatgaagttaaagccgcttttgaaaacagcgccactcgtgcttttggtcctgctggttttctcgagcaggatgactcggagaactggtgtgaaatccagaaattgcttaaaggccaccgcgcccgcaacagcaaactgtgtctggaaatggggcttggtcaggaaaagcgccgcgacgacggcattcctggcattactaactatatcttttcagaaactgccgctcgtggaatgtaccaacgctgggccgatcttctgagtagcgaaagctggcaggaagtgctcgataaaaccgccgcttaccagcaggaggtgatgaaatgagtgcgcaagtttcactagagttacatcaccgcattagccagtttctctttcacgaagccagcttactggacgactggaaatttcgtgactggctggcgcagctcgacgaagagattcgttacaccatgcgcaccacagttaacgcgcaaacacgcgaccgccgcaaaggcgtccagccaccgacaacctggatttttaatgacaccaaagaccagctggagcggcgaatcgcccgtctggaaacgggcatggcctgggcagaagagccgccgtcacgcacccgtcacttaatcagcaactgccagataagcgaaaccgacatcccaaacgtatttgctgtgcgggtaaattatctgctttatcgggcacaaaaagagcgcgatgaaacattctatgttggaacgcgtttcgacaaagttcgccgtctggaagatgacaactggcgcttgctggaacgggatatcgtcctggatcaagcggtaatcacttcccataacctgagtgtactgttctgatgaatcgaatttatgcgtgtcccgttgcggatgtgccggagggtgaggctctccggatcgatacctcgcccgtcatcgccctgttcaacgttggcggcgagttttatgccattaacgatcgttgcagccatggtaatgcgtcaatgtcagaagggtatctggaagatgacgccacggtggagtgcccgctacacgccgccagtttttgcctgaaaacggggaaagcgttatgcctgcccgccaccgatccgctcaccacttatccagtacacgttgaaggtggtgacattttcatcgacttaccggaggcgcagccatgagcgatctgcataacgagtccatttttattaccggcggcggatcgggattagggctggcgctggtcgagcgatttatcgaagaaggcgcgcaggttgccacgctggaactgtcggcggcaaaagtcgccagtctgcgtcagcgatttggcgaacatattctggcggtggaaggtaacgtgacctgttatgccgattatcaacgcgcggtcgatcagatcctgactcgttccggcaagctggattgttttatcggcaatgcaggcatctgggatcacaatgcctcactggttaatactcccgcagagacgctcgaaaccggcttccacgagctgtttaacgtcaatgttctcggttacctgctgggcgcaaaagcctgcgctccggcgttaatcgccagtgaaggcagcatgattttcacactgtcaaatgccgcctggtatcctggcggcggtggcccgctgtacaccgccagtaaacatgccgcaaccggacttattcgccaactggcttatgaactggcaccgaaagtgcgggtgaatggcgtcggcccgtgtggtatggccagcgacctgcgcggcccacaggcgctcgggcaaagtgaaacctcgataatgcagtctctgacgccggagaaaattgccgccattttaccgctgcaatttttcccgcaaccggcggattttacggggccgtatgtgatgttgacatcgcggcgcaataatcgcgcattaagcggtgtgatgatcaacgctgatgcgggtttagcgattcgcggcattcgccacgtagcggctgggctggatctttaaggaagcacgatgaaagaaaaaacgatcattattgtcggtggcgggcaagcggcggcaatggctgcggcctcgctacgccagcaagggttcaccggtgagctgcatctgttttccgatgagcgacatcttccttatgaacgacctccactctcgaaatccatgttgctggaagattccccgcagttacagcaggtgttacccgctaactggtggcaggaaaacaatgttcatctgcattccggtgtaaccatcaaaacgctgggtcgcgacacacgagagttagtgttaaccaacggcgaaagctggcactgggatcagctttttatagcaaccggcgcggcagctcgaccgctgccgttgcttgatgcactgggagaacgctgctttaccctacgccatgccggtgatgccgccagactgcgagaagttctgcagcccgaacggtcagtcgtgattatcggtgccggaactattggtctggaactggctgccagcgccacgcagcgcagatgtaaggtgacagtgattgaactggcggcaaccgtcatgggccgtaatgcaccaccgcccgtgcaacgctatcttttacagcgccaccagcaggctggtgtgcgcattctgctcaataatgccattgaacatgtggtcgatggtgaaaaagtagaactgacgctgcaaagtggggaaacgcttcaggctgatgtggtgatttacggtattggtatcagcgccaacgagcaactggctcgcgaggccaaccttgatactgccaatggcattgtcattgatgaggcttgccgcacctgcgatcccgcgatctttgccggtggcgatgtggcaatcactcgtcttgataatggtgcactacaccgctgcgaaagctgggaaaacgccaataaccaggcgcaaattgccgctgccgcaatgttagggctaccgctaccgctactgccgccgccgtggttctggagcgatcagtacagtgataacttacagtttattggcgatatgcgtggcgatgactggctttgtcgtggcaacccggaaactcagaaggcgatttggtttaatctgcaaaacggcgtgcttatcggtgcggtcacgctgaatcaggggcgtgagattcgcccaattcgcaaatggatccagagcggcaaaacgtttgatgcgaaactgctgatagatgagaacatcgcgcttaaatcactgtaaccaggataattagcgaatatctcaatgcctggggcgtggcgaggtgcaagagtgtgtattacgtttaaatcacattatcttgcaaagggattggttatgaacacactacgttattttgattttggagctgcccgccccgttttgttattaattgcccgtatcgccgtggtcttaattttcattatttttggttttcccaaaatgatgggctttgacggtacggtccaatatatggcctcgttgggcgcgccaatgccgatgctggcagcgattattgcggtagttatggaagtgcccgccgcgatattaatcgtgcttggctttttcacccgtccgctggcggtgctgtttattttctacacgctgggtacggcggtgattggtcaccattactgggatatgaccggcgatgcggttgggccaaatatgattaatttctggaagaatgtcagtatcgctggcgcgttcttgctattggcaattaccgggccgggggcaatttctctcgatcggcgttaggaaagatgccggatgcggcgtgaacgccttatccggcatttaataaattacagccactctacccgcaacgacatctctgaagttgttgattcccctggtgctagcgcaatgagatcacccccttccgggcgatgatgatcatccggcgcatggctcatcggttccagacagaagaaatcaaacgcatatcctttatcaaacgcagggtcggaaacaaagatgaaataacacggtgcaggtggcgtcgtttccatgatgatggcataaccttcctgcggctgctcgatgcgggcctgaccattccatccggcaaaaccattgttcacccactggcgcggcaacggcgcgggctggttaaaatccagttcctgcggtagctgctcgcaaaactcacccgccagccactgctcccgctccagccagtaaccgctcgcctgtgcctgaatccgcgtttgcggcgacaacggaaaataaggatgccagccggtaccaaatggcagcgtctctgccccttgattggtgacagagagcgtcaccgtcagcgtatccgccgttaaatgaaacgcctgacttacccgatagtgatagacaccgctgcgatgttcatacaccagacacaaactatcatcgctgtgcgagacacattgccactcgcccagccagccatcgccgtgtagatagtgcgcatcccactcaacattcggttgcagttgatactcacgcccctgccagacaaaacgattgccgctcacccggtttgcaaatggcaccagcggaaaacatgaggcatcggttgccacaccgctttttttaccaggacgtaagagcggcgtcgtatcgcgccagaagccttcgattacgccgccctggtcagaaacgtccagctttagcgacccgtgggataaggtatagatggtcatccgctaactccttaatccgggaagttaatcacaactttcccgcatttgccgctcgccatcagcgcataggcatcacctgcctgttccagcgagaagcgatgggtaatggcgttacgcggccacagcttccagtccgtcagatcatgggcgcatttttccatatggaacagactggtcacccaggagccgataatccgccgttgatggtgcatcagatcggcgctgacctcgaattccacttttccggtttcaccaatgtaaaccacccgtccccagtcagcggtggattgcagtgccagcaagcgacctgcggcattaccggaacaatcgagcgcaacatccgcgccaccgtgggtgagttcggcgataatctgcggcagaccttcggtggttgctaaatagccgtgatccatcacccctaactgttttgccatcgccagacgttccggcagcatatcaacgccgatgatccgttttgcaccgcgacctttcgccagcatcatcgccatcatgccgactggccccagaccgaccaccagcacgttatcactgccggaaacttcgccgcgcaaaattccttcatacgctgtaccaacgccgcaactgataaacgcaccatcttcgtagctcagcgcatccggcaggaggatcagatctttttcttccgccagcaagtattcggcatgaccgccgtcacgctgccagccgtaagccgcttttccttcgccagtacaagaaataggaaaaccgcgacggcagttcgggcaaaaaccacagccagaaatgtgatacaccagcacgcggtcgccctctttaaaatggcggcagccttgccccatcgccacaatctgcccgcacggttcatgaccgttgataaagccctggtataacggtttatcgggtgccgccgctgtggcacggtgttgatgatagatatagtggacatcgcttccgcaaatcccggaggatttcattttgatcagtacctggttaatccccggcgtcggcaccgcaacttcccgcagatcgacggtcgaatttcctggtaaataagctgccagcatcgttttcataaatccctcattaacaatacgattaattttcatccctgccgcacccgcgccaggggcgttaaggtttagcgtttcgctttactgcttcgctgggtcagcaagatattcgccagcaccgccaccacgatgatgacgccgcgtaccacctgctggaaaaaggagttaataccgagcagcaccagaccgttaccgattagcgtaatcaccagcacaccaagcaatgtaccgaacagggaaccgcgaccgccggaaagtgccgtaccgccgaccacgaccgcggcgatgacgtcaaactccagaccgtttgcggcacctgcgttaccagaaccgaggcgcgccgccaacaaaatgccggtcaccgccgctaataatcccgaaagggtaaagataagaatgcgcacccgacgaacgttgatgccgcacaactgcgccgccgtagcattaccgccaacggcaaaaaccgagcgcccgaaggcggttttgcggctgatgaacacaaacagcgcaaacaacacaatcatgatcagcgcggataccggcacaccgagaaattgtccgcccagccagtccagcacctcgttttcatcaatcggcactggcagtgcgttcgtcataaacagccccattccgcgcagggcgctccacagccccagtgtggcaacgaaacttggtacattaaacacgccgcgcagcaccccggccagcgttcccatcagcgcgcctaacagcaacaccagcaggcacgccaccgccagcggaacttcaaattgcagcaaaaatgccaggcacaccgagacaaaagccaccatcggcccaacgctgacatcaatttcaccggagataataatcagcgtcatcgcccaggcggcaatcccaatggtggcggcatcgcgcagcacgttcatctggttattcaatgagataaagccaggcgcgttcagggagaagaccagataaagaatggcaatcaccaccagcaaaccgatctcattaatatggcgactgacaaattgtttgagcgagacgctcttgccctgcggcaatggtaatgacgaagcagacatcttcaggttcctcggtaaaattcatcagtgcacagacagaatggcggacatcagctcatccacattgaccggagcgtgaaactcctgcgagaacgtgccgtgctgtaataacaggatgcggtcacacaccagcggcaactcctccacttcactggagataaacaccacgctttttccttcggcagccagctcacggacaatacggtaaatctgctgtttggcttcgatatcgacgccgcgcgttggctcgtcgagcaacaaaatctggctggcagcatagacccaacgaccgatcaccactttttgctgattgccaccagaaagcgtgccgatgggtgtttcgctactggcggccttgaccgtcatccgctgcatcacctcttcggtcaggcggcggatggtggaccattgcagcacaccgttggcgctgattttttgccgattggtcagcactgtattttcgtcaacgcccaaccagggaatgatccccgcttctttgcggttttctggcgtatagccaatgccgcgtttcagcatgtcgccgtaatcggggcgcgtgattttctcgccgttgataacaatttcgccctgttcatactcctccagcccaacaatcgccttcagcaattcactgcgccctgcccccagcagaccagcaatgccgagcacttcgccacgacgtagcgtaaaactgatatcctccagcttgggcttatggcgtaacgcacggacttccagcacggcctgatccacaatttcctgaggggctaccggcgcaatatcaacgtgatcgcgcccgagcatcagcgacacaatatgatgcgtggaggtgttttcgagcatcacatcgcccgccacctgaccatcgcgcataacggtggcacaggaggcaatgcggcgaatttcttccatccggtggctgacataaatcaccgccacgcccagtgccgacatctttttcaccgcgctgatcaccagttcaacttccgcactcgcaagcgaactggtaggttcatcaagaatgaccacgcgcggctcgcccttcatcacccgcgcaatttccaccagctgcttttgcgccgggcttagcgttgaaacaagttgttcaggactaacgtcaacgcccagcgcctgtaagcaacgttgggcatcctgcgccatttgcaggtaatcaatcatgccgttgcggcggggccactgaccgaggcagaggttttccgccactgtcagcccttccaccagacttaactcctgataaaccgcgcgcacccccagttcagcggcacggcgagtcagcgtagcttcgtcaccttccagtcgcgtctcgccaatccagatatcaccgctatccgggcgttcgctgccggtaagcattcgaatgagagtcgatttgcccgcgccgtttttacctaacagcgcacgaacttcgcctttattgagcgtgaagttaacgttatccagcgcaacgacgccgggataacgcttatttcctgccaccacttttgctaccgggactgcctctgttgccgtgaacatagggacctctgcgaatcagcgattagggcagaccatcaacgtgcgttgccagccactgtttaccgtcttccgttttggtatagagatcgataggcacctgaatcactttttcaccgtcggcttgtttattgataaccttcaatgtttgcgcgaaaacagcattgcccattttcttaccggaaatatccactaccgctttcagcacctgattgttttccagctcctgagcaatttcggttgtcatatccgaaccgaaaacagcaatttttccggcctgattttgattacgtaccgcttttaccgcgccgagtgtcgcaccgcccgattcccccataatggcgttgagatccggcgtggagataattagtttttcaccaacggaaatcgctttatctaaaacagtcccttcctgattagcgacaatttgcgcgccgggaacgcgggattttaaaacttcttcaaatcctttacgtcgctgcacacaaacttcaaaggcttcgcaattgatgacggcaattttcggctggtcaattttattggcaataaaataatcagcggcagcgttacccagttttttaccaaattccagcggatcgccgaccagatacgccgagacatatttatcgacccccttttgattaatacaggtgttgtagcaaatcaccggaatgcccgcttcactggcgcgacgaacggtacggctactgccattttcagacactgccgataaaataatggcatcgacattacgcgccacgagggtatcaacaaaggtactttctttcgaaatatcaccctgggcgttagtttctattaactgaacttgtactgaggaatcttttgccgcatcctgaacgccctgacgcactccagcgtagtatccctgagtatcaaggtatattgcgccaatggtcatttctttttccgcagccctggcaaatagtgcgctacctaatagcgtagccattaataatagattacgggttgttctcatttttgtaggcatagagcctcctgtagggtttttattaacaacggcttattctaattattttgtgatgagcggcagcgcgtgccgctcaaatattacagttaatagggtttagtgaacgcggttaaaaataaaaggcatcacggtggtgaataatgccgctttcggccaagccggattaatcgccgtcaattcagcgcgagcagactcatattgcgcaacctccccgagtcccgcggacgccagcatcgccaccatcaggcatttttctttatgctgctgttgtaaatcgccatacagcgacaacaagtcaggttgcgagacggcaaagaaatccgcttcgatactggttttcgccatctcttgcgcccactgtttcatttcactaaacagttgctgtgcggtttgttgttcgcccagcagtcgcagcgccatcccttgccagaagagataatcaaccggctgatcgttgtaataactgtgaatgttaatagtgcgatcgccggtcgccgccagacgtaaacaacgcgtcgcttcagtttcatcgccctgcgcgttggcgcatatcgcctgccagaaccagatgtcgttatcagtttgccccggtaaacggccttcgcttaaattctccggataatgcagcgcggcatgaagcagttcgcaggcctgctgcggctgtctggcatcaagatgctgccaggcgcgtaataactggttgaggataaactgactggtgaccttcccttccccgccttcccacgggtggaatttgcgcgtggcgagaatgtccgccgctttgtctgcctgacccgtgagatgccacaaattgagcagttctgcggtcatgtcgtcgcgtttcagcgcaatttccagattattttccagacgcgccagtcgtttctccggtgtggctccacttaacttatccagcaaatcccgttcgaaaagcagacgtgcatcctgcggcgcaagctgataagcattatcaagataacgcgcggccagctcataatcgtgttgcttattccacgcatggatcgctaacccgcgccagccgtcggcaaactccggcgacatctctacgcaacgttgccaaaaggcaatggctttgttgtagctacgtttgttgtagtagaagcaagctagtaaatggcgagcaaaccagcactcttcaatactctccagcgccgccacttcttccagcgtattcgggaaacggacaaactgcgggaagacatcaatggcttttgcgaccagttcgccacgttcggctttcggcagcaagctggcttgcaggtaaagcggcagcgtgcgctggcagtccagtgcgttcagcatctctgccgccagggtgggcattccccagttaatcagttgcccggcggtcatcagggcgttaacgtcgcgtccctgacacagaccgcgccactgcgcgagagctgattcgctacgaccatcgaaccagttcagccaccacagagtggcgttcagcggataatcgcgcagcagtttctcgcgctgcacacgcgcgttgtcctgacgaccacttaacaccagcagcagattatgcaggcaaagcacttcctgattggttgggcaggcgcgaagactttgttggcaaaaatccagaccagcgtcgaagttaccattacgcgccgccagtcgtgccaggccataatagccaccggctttgctgttgccgctccagaccgcacgccagaaatcctcttcggcttgttgatattgtccctgacgttcgtaagcactggcgcgaatcaaactcgcctgtccgcactgcggatttttgttcagcgcatgtgcgcgtttcagagcctgagtggcatacgccaccgcttgcgggaaatctgcgcggttatattccagcatcgccagcgccaggttacagcgataatccagcgggtccagcgccacgccgcgcaggtagtaatcgaacggtgaacggctggcgtgatgatattgctccagatgctgaccgataaaccaggcttcatctgtactggtaatgtcttgtgctgccagtggcgctttggcgacgtccggtaacggcaacgcttgcggctgatgttcctgataactcagtacaatattgccgtcggcatcggagagctcaatggtcagcctttcaggattgataccgtgcaacacgccctggatggcggtcgcaggcatcagtgccacggcatcatcaagtaacgcgttgcatttaccgatttcgcggatcgccaggcggtatccgttcaacggagagatggcatacagcccccactcaatcccccgcttactacgctggagttttatcaccgcatcgcgggaggcattttgcaccatgcccaaagaatgataaggcaggaaatactgctcaaaacgcttctcttcgtaagcatcaagccaggtaaaatcgggctggttatcggcaaaaataccggtcatcagttcgatatacgggccgttattgtcggtcagactcttatcccacgcctggccaaattcactgtgtccccaactccactgttttttacctggcgcaatatggtggttggcaacgtgcagcaaaccgccatcttcatcgtgacaccacgcgccgacaaaatcgtactgcgatttttcggccatatatgaggttggaacaggcacatttttatagcgagaaatgtccactccagcggagtagtccactttgtagtaagtgccggtagcgatggggaaagcggagacggcccgtttgccgtgatcaaacaccgccgttacatccggcgggaagacgctctgatgcccttccccccctttcactgccgggttggcccaccacaagaaatgacgcggcgtggcgttcccgttatagacgcggctggcgatttccagcgccgcccggtcagggcgcagggtgaaacctgtcatcacctgtaaaccatgcatcggctccgtttcgcctacccacaccgtctgtgcaccgtcttcatgggcttcgagggtgaaatcaacgggcataaaggtggtcgggcgatgatgttgcggccagttaaactcaatcccaccggaaatccacggccccagcagccccaccagcgcaggtttaatgacttcattgtgataaacaaaatcgcgctgtttcactttatcccacgcgcgatgcacccgaccgcccagttccggcaggatcatcactttgatgtagtcgttttccagccacaccgcctgccaggatttcagggttttctgctcgctcagcgtatcggtcacgccgtagggataaaccgcgccggacgatccctgataaacgcgattttccaggaacatgggatgtatatcctgcggcccggtttcataggtcgggatctcaacgcgctcttgccacacttttactggagtcatggtgccctcaatattaacaagacatactgaattaaaagatttgtggcagtgtattgaacaatctggcaatgttttcgcggaataatcacgcaattaactaaacaaggtttagtgaagatgagagcctgcattaataatcaacagattcgccaccataacaaatgcgtgattctggaactgctgtaccggcaaaagcgcgccaataaatcaacgctggcccggctggcgcaaatttcgattccggcagtcagtaatattttgcaggaactggaaagcgaaaaacgggtggtgaatattgacgatgaaagccagacgcgcgggcatagtagcggtacatggctgattgcgccggaaggtgactggacgctgtgcctgaacgtgacgcccaccagtattgagtgtcaggttgctaatgcttgtttaagtccgaaaggtgaatttgagtatttacagattgatgcaccgacgccgcaggcgctgctgtccgaaatcgaaaaatgctggcatcgccaccgtaaattgtggccggaccataccatcaacctggcgttggcaatccacggtcaggttgatcctgtgaccggcgtgtcgcaaaccatgccgcaagcgccgtggacaacgccggtggaggtgaaatatctgctggaagagaagctcggcattcgggtgatggtcgataatgactgcgtgatgctggcgctggcggagaaatggcaaaataattcgcaggaacgggatttctgcgtgatcaacgttgattacggcattggctcgtcgttcgtgattaacgagcaaatttatcgcggcagtttgtatggtagcggacagattggtcacaccatcgttaatccggatggcgtcgtctgcgactgtggacgttatggctgcctggaaactgtcgcctcgttaagcgcattaaaaaaacaggcgcgggtatggctaaaatcacaaccggttagtactcaacttgatcctgaaaaactgactacagcgcagttaatcgctgcctggcaaagtggagaaccgtggatcaccagctgggttgatcgctctgccaatgccattggtttgagtctgtataacttcctcaacatcctcaatattaatcagatttggttgtacggtcgcagttgtgcctttggtgagaactggcttaatactattattcgccagacaggatttaacccgttcgaccgcgacgaaggaccgagcgtgaaagcgacgcaaattggctttgggcaattaagccgcgcacaacaggtgctgggaattggctatttgtatgttgaggcgcagttacgacagatttgatggcgcgataacgtagaaaggcttcccgaaggaagccttgatgatcataaacgaaaaattgcctgatgcgctacgcttatcaggcctacacggagattgcaatatattgaatttgcaaagttttgtaggccggataaggcgttcacgccgcatccggcatgaacaacgagcacattgacagcaaatcaccgtttcgcttatgcgtaaaccgggtaacgtgcgcagatgtcgagaactttacctttgatgcgctcgataacggcttcatcattgatgctgtccagcacgtcacacatccagccagccagttctttcgcttcggcttctttaaagccgcgacgggtaatcgccggagtacctacacgaataccggaggtcacaaacgggctcttcggatcgttcggtacgctgtttttgttgacggtgatgttagcacggcccagagcggcgtctgcttctttaccggtcaggtttttatcaaccagatcaaccaggaacaggtggttatcagtgccgccggaaaccactttgtagccgcgctcgaggaacacttctaccatcgctttagcgtttttagcgacctgctgctggtaagttttgaactcaggctccatcgcttctttcagagcaaccgctttaccggcgattacgtgcatcaacggaccgccctgaccaccagggaaaacggcagagttcagttttttgtacagctcttcgctaccacctttcgccaggatcaggccgccgcgcggacccgccagggttttgtgagtggtggtagtaacaacgtgagcatgaggaaccgggttcgggtagacgccagcagcaaccaggcccgcaacgtgcgccatatcaacgaacaggtaagcaccgatgctgtcagcgatttcacgcattttcgcccagtccaccacgccggaatatgcagagaaaccaccgataatcattttcggcttgtgttctttggcttgtttttccagatcggcgtagtcgatatgaccggtagcatcgataccgtaaggaacgatgttgtacagtttaccggagaagttaaccggagaaccgtgagtcaggtgaccgccatgcgccaggttcatacccagaacggtatcacctggttccagcagcgcggtgtagaccgcaaagttagcctgggagccggagtgcggctggacgttagcgtagtcagcgccgaacagttctttcgcacgatcgatcgccagttgttcaacgatatcaacatactcgcaaccgccgtagtagcgtttgcccggataaccttcagcatatttgttggtcagctgagaaccctgcgcctgcattacgcgcgggctggtgtagttttcggaggcgatcagttcgatgtgctcttcctgacgtactttttcctgctccatagcctgccacagttcggcatcataatcggcaatgttcatttcacgctttaacatccgcatctcctgactcagctaacaataaaatttttggcctttataggcggtcctgttggacaacggcgaacagtataaccgaatcattgtgcgataacaggtcttgacaaaggaatttacgcaaacgattaccttcaggctacgcaaggctttggagaataaagagcttgcaaccggaaacggatttcttttcaggtttgtgatgcaaatttttcacttcatcacattctttctgaaaaacaccaaagaaccatttacattgcagggctattttttataagatgcatttgagatacatcaattaagatgcaaaaaaaggaagaccatatgcttgacgctcaaaccatcgctacagtaaaagccaccatccctttactggtggaaacggggccaaagttaaccgcccatttctacgaccgtatgtttactcataacccagaactcaaagaaatttttaacatgagtaaccagcgtaatggcgatcaacgtgaagccctgtttaacgctattgccgcctacgccagtaatattgaaaacctgcctgcgctgctgccagcggtagaaaaaatcgcgcagaagcacaccagcttccagatcaaaccggaacagtacaacatcgtcggtgaacacctgttggcaacgctggacgaaatgttcagcccggggcaggaagtgctggacgcgtggggtaaagcctatggtgtactggctaatgtatttatcaatcgcgaggcggaaatctataacgaaaacgccagcaaagccggtggttgggaaggtactcgcgatttccgcattgtggctaaaacaccgcgcagcgcgcttatcaccagcttcgaactggagccggtcgacggtggcgcagtggcagaataccgtccggggcaatatctcggcgtctggctgaagccggaaggtttcccacatcaggaaattcgtcagtactctttgactcgcaaaccggatggcaaaggctatcgtattgcggtgaaacgcgaagagggtgggcaggtatccaactggttgcacaatcacgccaatgttggcgatgtcgtgaaactggtcgctccggcaggtgatttctttatggctgtcgcagatgacacaccagtgacgttaatctctgccggtgttggtcaaacgccaatgctggcaatgctcgacacgctggcaaaagcaggccacacagcacaagtgaactggttccatgcggcagaaaatggcgatgttcacgcctttgccgatgaagttaaggaactggggcagtcactgccgcgctttaccgcgcacacctggtatcgtcagccgagcgaagccgatcgcgctaaaggtcagtttgatagcgaaggtctgatggatttgagcaaactggaaggtgcgttcagcgatccgacaatgcagttctatctctgcggcccggttggcttcatgcagtttaccgcgaaacagttagtggatctgggcgtgaagcaggaaaacattcattacgaatgctttggcccgcataaggtgctgtaatttgatgttgccggatggaaacatccggcaacccttgacgcggtttaaattgccgcgtcgtcctcttcaccggtacggatgcgaatgacccgtgccacgtcaaagacgaagattttaccgtcaccgattttgccggtttgcgccgtgcgaataatggtatcgacacaggtatcgacaatgtcgtccggtacgacaatctcaattttcactttcggcagaaaatccaccatatactccgcgccgcggtacagctcggtatggcctttctggcgaccaaagcctttcacttcggtcaccgtcatgccggtaataccgacttcggccagtgcttcgcggacatcgtccagcttgaagggttttataatcgcatcaatctttttcatgctattccttgaaaaggtcgcctgtcttttgatctgctaaacgtaacacataacgccaattcattccttgaaatcgtttgcatccagctcgtgtcgggaaagcagtttataaaattctgtccggttgcgccccgccattctcgccgcgtgggtgacgttgcctttggtgatttgcagcagcttacgcaaatagttgagttcaaactgattacgtgcctcaacaaaggttggcagcgccgtattttcaccctccagcgcctgctccaccagcgcatcactaatcaccggagatgaggtcagcgccacgcactgttcaatcacgttgaccaactggcgcacattacccggccagctcgcggtcatcaggcgtttcatcgcatcggtagagaacgcgcggacaaacggtttatgtcgctctgccgcctggcgcaacaggtgatttgccagtagcggaatgtcttctgtgcgctccgccagtgccggaattttcaggctgacaacgttgaggcggtaatagagatcttcgcggaattccccgcgcgccatcgcttttggcagatcacggtgagtggcagaaataatccgcacattgatatcaatatcgcggttactgcccagcgggcgcactttacgctcctgcaacacgcgcagcagtttgacctgtaacggcgcaggcatatcgccaatttcatcgagaaatagcgttccgccttccgccgcctggaataaaccttcgcgattgctgacagcgccagtaaacgcgccacgcgcatgaccaaacagctccgactccagcaattgctcgggcaatgcgccacagttaatagcaataaatggtttgctgttgcgcgggctggcgttgtggatagcctgggcgaaaatctctttcccggtgccgctctgaccgttaatcaaaacgctgacgtctgattgcgccaccagccgcgcctgttccagcaaacgcagcatcagcgggctgcgggtgacaattgcctcgcgccagcgttcatcggtggctggcgcggattgctccagcgcatcgtcaattgcctgatatagcgcgtctttgtcgacaggcttggtgaggaaactaaaaacgccctgctgtgttgcagcaacggcatcgggaatagaaccatgcgcggtaagaataattaccggcattcccggctgcactttctggatttcagcaaacagctgcataccgtccatttcatccatccgcaggtcgctgatgactaaatctactttttcgcgattcagtacccgtaatccttcagcgccactttccgccgtgaccacactgtagccttcgctggtcaggcgcaggccaagcagtttcagcaatcccggatcgtcatcgaccaataataaatgcgcaggtttatggctcatcaggagtgacctcatgggtggatggcgcgggcttttcactctcgtgcggcgtatccggcgagaaatttccagccggtttgcgggtcgagagctggcgttcaatatcggtcaggttttccagcttgcgggtggtgagttccagttgctgctgtagaacgtgatgttgctggcgcaatgtatccagctcgctgtcgctggactgctggagtttactgtaacgttggcgctcttccgccagttgcagttgcagcgcctgaccatcgcgccagagttgatacagtgggcgaacctgtgccgggatctcggtacttaacgcttcaatacgcgcgaccagctggcggcgctcatacggcgtaattttggcgtcggcgagcaaaatcccttgtttaaaggtattttgccagctgccgtcgtcatattggcgagcttgctgacgcgactgcgcaggcattaaacgatcagcacaatccatcgcccgcagccagtaaagcggattggtttcggttgatttaccttgcagcgcccagatgtcgctacattcagtagaaagatagtcagccagttgataaaccggaattttttcttctgctggcgtatcaatggctggcttattgtgattctgcacgcaacccagcaatgccagacatggcagccctgccagccacagccgtcggggcaataatcgttgaaaaatgtgtcgcatattcaccagacttaaagcctatcccagtgggcgtaattgttgcagacagtctggacatggacagcgcggagaaaccggagcgtacatatcgtacgtgaagatttcgagcactgcccggggccgaactgacaaataaaatagcctgataggataggctgttagcattatttcgtgtttttcgacgacggtaattcaatgcggaaacaaacgtcttgcccgctctcgtcgaccagatacagttccccttgcatacggcgaatacaatccctggcaatgcttaatcccagaccgctgcccttcaccgccccttttcgctggtggcttccctgaaaaaagggttcgaagatcatggcgcgttcctcttgcggaatgggcgtgcctgtattgatgacatcaatataaacccgcgcaccatgtaaactgctgcgaaggcaaatgttaccggattcagccccgtagtgcaccgcattggagtaaagattatccagtacgctcatcagcagcattggctccgccaggcaagctgttgctttgagatcgacgtcggtatgcatcattttagcccgtgcgggcaggctatgagcagaaaccactgtctccaccagcggtgctaactcaacattctccagttccaccgcactgtccgcctgtttacggttgtaatcaagcagttgttcgatcagtttttgcaaattgcggctgctgctatcaagaatgctcaccacctctttttgctctggcgtaagcggcccgacaacctggtcagccagtaattcagtgccctcgcgcatactcgccagtggcgtttttaattcatgagataaatgtcttaaaaattgatggcgttgggattccagccatgacaggcgctcacttaaccaaagaatacgttgcccaaccgagcgtaactcgctcggtccactgaacgagacgctattgcccagagaacgcccttcccccagacggttgatcatgcgctcgatatttttcaccggcccgataatcatccgcgtgaaaagcagtaccattaccagactcaccagaaatagcaccagcgattgccaaccaaaatattgcccacgttcggcgatttcacgctgaagctgctgcccacgagagaacaccactgtgcgcgtggcctgtaccatttcggtattggcactggcaaaggcttcaagacgtgcggcggcggcagcatcgggaccgctgttgttacactgaagttgagccagattgtgcaaatcctgacgtaatgcctggtagagtttatcgtccggcagcacgcctgcgtgggcatcgagcatttcgctgtaacgcttgcgctggctttgataaaccttcgccagggttgggtcgtccagcacgcaatactgacggtaactacgctccatctccagcgccgcgttggtcatcgcttcactgcgccgggcatcaataagcgtagtgcggttaaccagcgccgcctgatcgctaagcgcattcaggctttgccaggcttgccatgccagcaccaacaggggcagcagaatcagcaaaaatgccagcattaccagttgtcgtaatgagcggggaaaaacgggccagcgtttcaaggtgttactctcgtcagacgcgaatagcctgatgctaaccgaggggaagttcagatacaacaaagccgggaattacccggctttgttatggaataaggcggtgcctaactcgacgtttcgcccgatggttgatatagctacgctgatatcagaagttggacggcaggcaccttgttgtgcgtcattcgtattttatgtagcacgtcccgaaggggctgacataagtcggtgaatgagccactggttactattatgcagtaactgtgccaataaagaaaatagtttggtaacgtactgattatacgttgctttgaggggtttatgtctcctccgctgtttgaatgtaaatcagccactgtgtcgctaaaaagagacaacttaagataaacttattagataatattaaaatcaatgagttaagtgtcgccagaaagcgacacggcaaaccacccattgtcgtgatttacagacacaaaaaagctcccggagttgggagcttatgatagtggttggtgcttaatgccgcatccgggctgcaaaaccaatgggctgacgacttaccccaactgcttacgcgcattgcggaaaatgcgcatccatgggccatcctcgccccagttttccggatgccaggagttgctgacagtacggaaaacacgttccgggtgcggcatcataatggtgactcgaccactttcagtcgtgactgccgtaataccgttcggtgaaccgttcgggttagccgggtaggtttcagtgactttgccgaagttatcgacatagcgcagtgccaccagccctttgctttccagtgccgccagatgcgccgcatcacgcacttccacgcgcccttcaccatgagagacagcaatcggcatttgcgagcccaccatcccctgcaacagcagagacgggctttgggttacttcaaccaggctgaaacgcgcttcaaagcgatcggaggtattgcgcacaaaacgtggccacaactcactacctgggatcagttcacgcagattagacatcatctggcaaccgttacatacccccagcgccagcgtttgcggacggtggaagaaggttgcaaactcatcgcgtacacggtcattgaacaggattgacttcgcccaaccttcaccggcacccagcacatcaccgtaggagaaaccaccgcacgcgaccagggcgtggaaatcttccaggcccgtgcgtccggtcagcaggtcactcatatgcacgtcgatagcatcaaagcctgcacggtggaaagctgccgccatttcaacatgcgagttcacgccctgctcacgcagtacggcaactttcggacgtgcgccagtggcaatatacggtgctgccacatcttcgttgatatcgaacgacagttttacattcaggcccggatcggcgtcgttagatttcgcctgatgctcctgatcggcacactccgggttgtcacgcaggcgctgcatctgccaggtagtttctgcccaccagacacgcaacgtggtgcggctttcgctgaatacagtctgcccgttggcggtaatcacaaaacggtcaccggaaaccgcctgccctacataatggacacaatcagcaagcccatgctgtgccagtacggactcgaccgcttcacggtcagcggcacgaacctgaatcaccgcacccagttcttcgttaaacaacgccgccaggcgatcgtcacccagagtggcgatatccgcgtcaatgccacaatgaccagcaaaggccatttccgccagcgttaccagcaggccgccatcagagcggtcgtgatacgccagcagcttacgctgtgcaaccagcgcctgaatcgcgtcatagaagcctttcagttgcgcgacatcgcgtacatctgccggtttgtcgccaagctgacgataaacctgcgccagcgccgttgcgcccagcgcgttattgcctttgcccaaatcaatcagcagcagtgcgttatcttcggtagaaagctgcggcgtgatggtgtgacgtacatcttccacgcgggcaaatgcagaaatcaccagcgacagcggcgacgtcatttcgcgctcttcgttaccttcctgccagcgggttttcatcgacatggagtctttacccaccgggatcgtcaggcccagcgccggacaaagctcttcgcccacggctttaacggcttcatacaggcccgcatcttcaccagggtggcctgccgccgccatccagttggcggaaagtttgatgcgtttgatatcgccaatttgtgttgcggcgatgttggttaacgcttcaccgaccgccagacgggcagaggcggcgaaatccagcagcgcaaccggcgcacgctcgccaatcgccatcgcttcaccgtagtagctgtcgaggctggcggtagtgaccgcgcagttagcgaccggcacctgccacggccccaccatctgatcgcgcgctaccatgccggttacgctgcggtcgccaatggtcaccaggaaggttttttccgccacagtcggcagatgcagcacacgtttcaccgcgtctgcaatggtgatcccttcacgggccagcgcgtcgcctttcgctttcagcgtttgtacatcgcgggtcatcttcggcgttttaccaagcaggacgtccagcggcagatcgatcggctgattatcaaaatgacgatcgtgcagagaaagatgcagttcttcggtcgcttcaccaatcaccgcgtagggtgcgcgctcacgcttacacagttcgtcaaacagcggtaattgatcggcagcaaccgccagcacgtagcgttcctgggattcgttacaccagatttccagcgggctcatgcccggttcgtcgcttagaatctcgcgcagttcaaatttaccgccgcgcccgccgtcgctcaccagttccggcatggcgttagaaagaccgccagcgccaacgtcgtggataaacaggattgggttggcatcaccaagctgccagcaacggtcgatcacttcctggcagcgacgctccatctccgggttgtcgcgctgtacggaagcaaagtcgaggtcggcatcagactgaccagacgccatagaagacgctgcaccaccgccaagaccgatgttcattgccgggccgccgagaacgaccagcttcgcaccgacgttgatctcgcctttttgtacgtgatcggcgcgaatgttgccgatcccgcccgccagcatgatcggtttgtgataaccgcgcagctcttcgccgttgtggctgttcactttttcttcataagtacggaagtagccgttcagtgccggacgaccaaattcgttgttaaacgccgcgccgcccagcgggccttcggtcatgatgtccagcgcggtgacaatgcgctcaggcttaccgaaatcttcttcccacggctgttcgaagccaggaattcgcaggttggaaacggagaaaccaaccagacccgctttcggctttgcgccgcgcccggtggcaccttcatcgcggatttcaccgccggaaccggtcgccgcgcccggccacggagaaatcgccgtcgggtggttgtgagtttcgactttcatcagaatatgcgccggttcctgatggaaatcgtagcggcccgtttcgtggtcagcaaagtagcggcccacttcagaaccttccattacggcggcgttatctttataagcagagagaacgtgatctggcgtggtttcgaaagtatttttgatcatcttgaacagcgatttcggctgctgttcaccatcgataacccagtcggcgttaaaaattttgtggcggcagtgctcggagttcgcctgggcaaacatatacagttcgatgtcgttcgggttacgaccaagctttgtgaaagcatcctgcagatagtcaatttcatcttccgccagagccaagccaagacgcaggttagcgtcgatcagcgcctgacggccctgccccagcaaatcaacgctggtaaccggagtcggttgatggtgggcaaacaactgctctgcatcatctaaagcaaaaaagaccgtttccatcatgcggtcgtgcagttcagcggtaacctgctgccattgttcattggtcagcgtaccggcttctatatagtaagcaacgccgcgctcaaggcggtttacctgttgtagcccgcagttatgggcaatatcggtcgctttcgaagaccagggagagatggtgccaggacgcggggtcaccagcaggagtttgccttgcggggcgtggctggcgagtgccgggccatatttcagcaggcgttcaagttgtgcgtgctcatcatcgtttaacggcgcattgaggtcagcaaaatggacatactcggcgtaaatattgtgaaccgggagcctggcagcctgaaaacgtgccagcagtttgttgattcggaatgccgacagtgcaggcgaaccacgcagaatttccatcataagtctctcgtcttctaagctttcggtgtacccaagggggggaaacgggcgtcattataaagaatctgatgcgctgacgaaaccgtttgcgtggaaataaaatcaccatcgtgaattagcaacgcgtgccgccaatggctgtaataagttgccatctggcgcaggtttacgcaaaatgccgctcatttatgagtaaacctttcactattattacgttttttcaagctgggacgcgcacgacacagagaattaactaattgaaaaaattaaagattaattatctgttcatcggcattctggcactgctgctcgcggtcgctctctggccatccattccctggtttggtaaagccgacaaccgtatcgccgccattcaagcgcggggagagttgcgtgtgagcaccattcatactcccctgacttataacgaaatcaacgggaaaccttttggcctggattacgaactggcgaaacagtttgccgattacctcggcgtaaaactgaaagtgaccgtgcggcagaatatcagccagctgtttgacgaccttgataatggtaacgccgacctgctggcggcaggacttgtctataacagtgagcgggtaaaaaattatcagcctggccctacctattattccgtgtcacaacaactggtttataaagtgggtcagtatcgcccacgtacgctgggcaacctgacggcggagcaactcaccgttgcaccgggtcatgtggtggttaacgatctccagaccctgaaagaaacaaaattcccggaattaagctggaaggtagacgacaaaaaaggctctgcggaattaatggaagatgtcatcgaaggaaaactcgattacaccattgctgattctgtcgccatcagcctgtttcagcgcgttcacccggagctcgccgtagcgctcgatatcaccgatgaacaaccggtgacttggtttagcccgttagatggcgataataccctttccgccgccctgctcgacttcttcaacgaaatgaatgaagacggtacgctggcacgcattgaagagaaatacctggggcatggcgatgattttgattacgtcgatacgcgcacatttttacgcgccgtcgatgcggtactgccgcagttaaagcccctgtttgagaaatacgccgaagaaattgactggcgtttgctggccgctattgcttatcaggaatcgcactgggatgcacaggccacttcaccgacgggtgtgcgcggcatgatgatgttaaccaaaaataccgcgcaaagcctcggcattacggatcgtaccgatgccgaacagagcatcagcggtggcgtgcgttatttgcaggatatgatgagtaaagtgccggaaagtgtgccggagaacgagcggatctggtttgccctcgctgcgtacaatatgggctatgcgcatatgctggatgcccgcgccctgacggcaaaaaccaaagggaatcctgacagttgggctgacgtaaaacagcgtctgcctttacttagccagaaaccctattacagcaagctgacttacggctacgctcgtggacatgaagcctacgcttatgtcgaaaatattcgtaagtatcagattagcctggtgggttatctgcaagagaaagagaagcaggctacagaagcggcgatgcaactggcgcaggattatccggcggtatcgcctacggagttgggcaaagagaaatttccttttctctcgtttctttcccagtcgtcatcaaactatttgacccattctccctctctgctgttttccaggaaagggagtgaagagaaacaaaattaatccgtcgaggattgcgcttttttctgcgctttaatttcctggcggcgcatgcgaaagaagtcactgagcaacgccgcgcactcatccgccagtattccttccgtaatttccactcggtgattcatacccggatgatgcagcacatccattaaagatcccgcagcgccagttttcgcgtcacgcgcaccaaagaccacgcgaccaatgcgactgtggatcatcgctccggcacacattacacatggttcaagcgtgacatacaacgtggcgtcgatcagacgataattttgcatcaccagaccaccctgccgcagggccatgatttctgcatgtgcggtgggatcatggcgaccaatcgggcggttccagccttcgccgattacccgattgttatgcactaataccgcgccgaccggcacttcccgctcatcccaggcacgtttcgccagcgtcagcgcgtgacgcatccagtattcgtggctaaattcgacttcagacaaaaagaaaactccggttataaaagcgcggcgcattatacacggacgctatgctttactctattccagttgctggagttcaccgcgcggggttactcgccaacgatgctgacagaaataaagcagcggattgtcctgattactgtcgctatagccactgtacagccgcagcggagtgccgattttgcgctccagttgtgcgaccttttcatgtcccagacaacgcatcgtcaatacccaaccaccatagccacgctgaatttggctggcgataagattaacccgcggcagccagggcgtatcgaaataaaccgcttcaaccagcggctgcggagagccggtaatcaaccagatatcagcatcggaacttaacaggtaggtggttaatcgctcctgaaccagcggaaaggcggtaacattgtcgcgaaaccagcgcacgaaatcggcctgcaacgtctgtaaacgtgcttcgctgtgaccaaaagtgcacccccacagaagcagactcatcggccagcgtgccgcacgaccttttatcaataacgcaatggctataatcggtaacaacggcaggacaagtaacgcattcagcggttggcgacgtagtaaatagcgcagaaaactgccgaacatatcctgctgatgcaatgttccatctaagtcaaaaaacaccacacgacgctcgtgagttgccaaaccatactcctctggactgaaacatcctgattaattttcgctactacatagcctaacagatagatcatcacttttccggcaacaatcgaccgcatcatggctaactggaatttttaattcatggcaattagcggcaatggaatataaaattcactcgcgtgtgtctcatattgcctgttgtcgccactatttcatcgcgaggaaagatatgaacggcttacttcgtatccgtcagcgttaccaggggcttgcccagagtgataaaaaactggcggattatctgctgctacaacctgatacggcgcgccatttaagctctcagcaactggccaacgaagccggagtcagtcagtccagcgtcgtgaagttcgcgcaaaaactcggctataaaggttttccggcgcttaagttggcgttgagtgaagcgctggcaagccagccggaatcaccctccgtgcccattcataaccaaatccgcggtgatgatccgttacggctggtcggcgaaaaactgattaaagaaaatactgccgctatgtacgcaacgctaaacgttaatagtgaagagaaactgcatgaatgcgtaacaatgttgcgctctgcgcggcggataattctgaccggtattggcgcttcgggtctggtggcgcaaaactttgcctggaagctgatgaagattggcttcaatgctgccgcagtgcgcgatatgcatgcgctactcgcaacagtacaggcgtcgtcccctgacgatctgttattagccatttcctacaccggtgtacgacgcgagttaaacctggcggcagatgagatgctgcgagtgggcggaaaagtgctggcgattaccggctttactccgaatgccctgcaacagcgtgcttctcattgcctgtataccattgccgaagaacaagcgacaaacagtgcttcaatctctgcttgtcacgctcagggaatgttaacggatttgctgttcattgcgctgattcagcaggatctggaactggcaccagaacgtattcgtcatagtgaagcgctggtgaaaaaactggtctgagtaaagaatgcgcgtataatgcccgcccggtttgtgttgttttgagagtttccttatggcgttgttaatcactaaaaaatgcatcaattgtgatatgtgtgaacccgaatgcccgaatgaggcgatttcaatgggagatcatatctacgagattaacagcgataagtgtaccgaatgcgtagggcactacgagacaccaacctgccagaaggtgtgcccgatccccaatactattgtgaaagatccggcgcatgtcgagacagaagaacagttgtgggataaatttgtgctgatgcaccacgcggataaaatttaatattctactctggaagtagagtattaattatattactgggaagccttaacgccattatatttatttaattgatgacattagcataatcattcactaagttaatttatatagtatctgcccagacacttatttatagttattaaaggtgcgtccgactggttcaccggacgcaccttaagtacgtttccttgtgttataagaacagaaggatcagctgtaaaacagcaatgatgattttgatgacccgtttaatcaggtatcggcaatcagtcattcgtttttccttaaacaaggaatgcagccattcagattagcccttacatctccccaaaactgaacgtgcgagttattgagggtgcatgctgcactccacaccagagctttgacgacaccactcgtttcaatgggggaattctgtggcatggtgtaaagcacagcaaaatcttcaataacgaagccaattttaatgtacttacgaattggcggtcacgttaatctttccatcaatattgctttcttcgtaaaggctcgagtttttatgctaaagattgcaagttgcttgtaaaagataagtacactgatccataatcgctgttgttgagggtgcatgctgcacaaaattaaagttaaaaagtaaaacccccgttccttaccagttcgggggttttactttttaaagagaacggtattatttttaactttcaataattaccgtggcacaagcatagtgccgctcatctgccagcgttacatgcatatttgcaacgcccagcttttccgccagttttaatgcctcgccccatagccgtagccgtggtttgccgagctcatcattgaatacttcaaattgattaaacgccagaccattgcggatcccggtgccaaacgcttttgctgcggcttctttcacagcaaaacgcttcgccagaaaacgcaccggctggtggtgcgttttccagatagcccattcgttatcgcttaatacgcggcgtgccaggcgatcaccggatcgggcgatcaccgcttcgatgcgagcgatctccacaatatccgtgcctaaacctaatattgccattagccacgcgcttccagcatcagacgcttcatttctgccaccgcatctttcagtccggtcatcactgcacgaccaataatggcatgaccgatattcagttcatgcatctcagggatggcggcaatggctttcacgttgtgataggtcagaccgtgtccggcgttaactttcagaccgaggcttgcggcaaaggtcgcggctttggcgatacgcgccagctcttgcgcctgttcggcgtcagttttggcatcagcatagcaaccggtgtggatctcgataaacggtgcgccaacctctgccgcagctttgatctgctcttcatcggcgtcaataaacagagaaacctgaatcccggcatctgccagacgtttgcaggcatcgcgcattttgtcacgctgccctgcgacatccaggccgccttcggttgttacttcctgacgcttttccggtaccaggcagcaaaaatgtggcttcgtctcaacggcgatcgccagcatctcttcggtcaccgccatctccagattcatgcgggtatccagcgtctgacgcaggatgcgcacgtcgcggtcagtaatgtgacggcgatcttcacgtaaatgcacggtaatgccgtccgctcccgcctgctcggcaataaacgcggcctgcaccggatccgggtaagcggtaccgcgcgcgttgcgcagcgtagcgatatggtcaatgttgacgcctaacagtaattcagccatgacaatcctcatcattcataatgtgttttcaccgttcgcttaggcataaactgccggaacagttccctgctctttaaaggtttaccgccaagatacggcttaagcgccatgcgggtaaagcgtttcgcggcgcgcagtgtgtctgcgtcaggaaattcccgtgcgtttaacgcttttaactgccttccggtgaacgttttattgtcgataacgacgcttgcgataaaccctttttcttcgcgataacgatacgtcatggtgtcatctaccggctcgccgctacccgcacaatgggtaaaattgacgccataacccagatgcccgagcagtgccagttcaaagcggcgcagcgcgggttctggcgtaccagtgacccctgcaagagactgaatgcagtgcaagtaatcgaaaaaaagttcagagaagcgcgtctcgtattccagtacgcgggagagaagttcgttgatgtacagaccgctgtaaagcgtgataccgcttaatggcagcgccagcgagacggcttcagcactgcgcagcgttttgacttcgccacgcccgccaaaacgtagcaagagaggggtgaaaggctgtaatgcacctttcagggtagagcgtttagagcgtgcgcctttggcaaccagacgcacgcgccccgattcctccgtgaagacgtccagcatcaggctggtttcgctccacgggcgactatgcaggacaaatgcgcgctgccagccttccatcggagttactcttaaagatcgtcaacgtaaccgagactgcgcagtgcgcgttcgtcgtcggcccaaccggatttcacttttacccacagttcaaggtgaacaggcgcttcgaacatttcctgcatgtctttacgcgcttcaatcccgatggttttgatcttggcccctttgttgccaatgaccatcttcttctgcccttcacgctcaacgagaatcaaaccgttgatgtcataaccaccgcgttcgttagagacgaaacgttcgatctccacggtcacggagtacggcagttcagcgccgaggaaacgcatcagtttttcgcggatgatttcagacgccataaaacgctgtgagcgatcggtgatgtaatcttccgggaagtgatgagtcgcttcaggtagatgcttacgcacgattgccgcaatagtgtcaacattcagcccggtttcggcagagattggcacgatatcgaggaagttcatctggcttgccaggaactgcaggtgcggcagcagatcggctttctcctgcacgttgtccactttgttcaccgcgaggattaccggcgctttgccttcgcgcagtttgttgagcaccatttcgtcgtccggcgtccagcgggtgccttcaacgacaaaaatcaccagctcaacatcgccaatagagctgctcgccgctttgttcatcaggcggttaatggcgcgtttttcttccatatgcaggcccggtgtatcgacgtagatcgcctgatacgcgccttcagtatggatccccacaatgcggtgacgagttgtctgcgccttgcgggaagtgatggagattttctgccccagcagtttgttcaacaatgtggatttgccaacgttcggacgtccgacgatggcaataaatccgcagtaacttttatcgatgctcattccagctccagttttttcaacgcctgttcggcggcagcctgctcagccttacgacggcttgaacctgtgccaaccaccggttcactcaggccgctgacctggcagtggatagtaaattcctgatcgtgcgcttcgccacgtacctggactaccagataagtcggcagcggcagatggcgaccctgcaaatattcttgcaagcgcgttttcggatctttttgtttatcgcctgggctaatttcgtccaaacgagtttgataccagttgaggattaatttctcgacggtttgaatatcactgtcgaggaatacgccaccaattaatgcttcgacggtgtcggcgagaattgactcacgacgaaatccaccgcttttaagttcacctggccctaaacgtaagcactcgcctaactcaaattcgcgcgccagttccgccagcgtattgccacggaccagcgtggcgcgcatccggctcatatcgccttcatccacacgagggaaacggtgataaagcgcattggcgataacgtagctcagaatagagtcgcctaaaaattctaaacgctcgttatgtttactgctggcactacgatgagttaatgcctgctgcaacagttcctgatgattaaaagtgtagcccagcttccgttgaagccgattaattacgatggggttcatgcgataccaataaataaatgcgtcaacaattcagcacacgaaacagacctgatatacatggttctgctaactgcttcgctgcagtttcagtttaccggtatatggggaccaacgctgtttcgtgtgccgtggcaacctggaggtgccaaccttaaacttcgggggaatattctatacacaacgacgggggatgtcgttagccacgggagatttatctcataaataattcacgttgtcgccataacggcgacaacgtgaacgaagatggctattaatggatgccgccaatgcgacttaagcgcagaccagtcggccattcgccttcttgcttatcgaagctcatccagatagccgttgcccgaccgaccagattcgcttccggcacaaagccccagtaacggctgtccgcgctgttgtcgcggttgtcgcccatcatgaagtattgtcccggaggaacaatccaggttgccagttgttgccctggctgctggtaatacatccccacctgatcctgcgcaatcggcactgtcagaatgcggtgcgtcacatcacccagtgtctctttacgctcggaaagacgaattccattttctttggtttcgtttttcggcacttcaaagaatccgctggtcgcttccccaccattacggcgtgagaaggtctgaacgaaatcgctcggttccacgtttgagtaggtgaccggcagcgcgttttcacacgcctggccggaactgcatcccggttgaatcgtcagctcttttgagaccggatcgtaagtgactttatcgcccggtaaacccaccgcgcgcttgatgtaatcaagctttggatcttccggatatttaaagaccacgatatcgccgcgtttcggatgaccggtttcgatcagcgttttctggtagataggatctttaatgccataagcaaacttctctaccagaataaaatcaccaattaacagagtcggcatcatcgaacctgacgggatctggaacggttcataaataaacgaacgcacaatcaatacgatagccagtaccggaaaaacagaagcaccggtttccagccagccaggcttcggcgcaacctttttcaacgttgctttatccagtgagtccccggcagccgcctgcgccgctgcctgacgttcccgccgtttaggtgcgaaaaagaatttatccacgcaccataaaatgcccgtcaccagtgtggcaatcaccagaatcagggcaaacatattcgccatgccaactcctaagggttatttgttgtctttgccgacgtgcagaatggcgaggaacgcttcctgcggcagctcgacgttaccgatctgcttcatgcgtttcttaccttctttctgcttctgcagcagctttttcttacggctgatatcgccgccataacatttagccagtacgtttttacgcagctgtttcacggtggatcgcgcaatgatgtgcgtaccaatcgctgcctgaatggcgatatcaaactgctggcgtgggatcagatctttcatcttctccaccaactcgcgaccgcggttttgcgaattatcacggtgggtgatcaacgccagcgcatcaacacgttcaccgttgattaatacgtctacacgtaccatgtcggacgcctggaagcgcttgaagttgtaatccagagacgcataaccacgcgaggtagatttcaggcgatcgaagaagtcgagcaccacttccgccatcgggatctcgtacgtcagcgccacctgattaccgtggtaaaccatattggtctgcacgccgcgtttttctacgcacaacgtaataacgttgccgagatatgcctgcggcagcagcatgtgacactctgcaatcggctcgcgcagttcgtagatgttatttaccgcaggcagcttggatgggctgtcgacgtagataacttctcttgacgtggtttcaacttcatacactacggtcggcgcagtggtgatcagatccagatcgtattcacgttccagacgttcctggatgatctccatgtgcagcaggccgaggaagccgcagcggaaaccaaagcccagcgcgctggagctttccggctcatagaacagtgaggcatcgttcaggctgagtttacccagcgcgtcacggaaggcttcatagtcgtcggaacttaccgggaacagaccggcgtatacctgcggtttgactttcttaaagccaggcagcgccttttctgccggattacgcgccagcgttaaggtatcgccgactggagcgccgtggatatctttaatcgcacatacgagccagcctacttcgccacatttcagttcagtgcggtcaacctgtttcggcgtgaagatgcccagacggtcggcgttataggtctgcccggtactcatgactttcactttgtcgcccttacgcagggtgccgtttttaatacggataagtgaaacaacgcccaggtagttgtcgaaccatgagtcgataattagtgcctgcaacgggccttccggatcgccttccggcggcggaatgtcgcgcaccagacgttcgagaacgtcctgcacaccaacgccggttttcgctgaacagcgcaccgcgtcggtggcgtcgatgccgacgatatcttcaatttcttccgccacgcgttcaggatcggctgccggcaggtcaatcttgttcagtaccggcacaacttcgagatccatttccatggcggtgtagcagtttgccagggtttgcgcttctacgccctgcccggcgtcgaccaccagcaatgcaccttcacaggcagccagcgaacgggaaacttcataggagaagtctacgtggcccggggtgtcgataaagttaagctgataggtttcgccgtcagacgctttgtagtccagcgtcacgctttgcgctttgatggtaatgccacgctcacgctcaagatccatggaatcgagaacctgcgcctccatttcacggtcagacaggccaccgcagatctggataatacggtcagacagcgtcgatttaccgtggtcaatgtgagctatgatcgaaaagttacgtatattcttcataaagtatgattattgtgccttaatgcccggttaaccaggcttttagaagtcgctgttctgagcttaacgtctgtattaatagaaacgccgcattctacactacaacattgaggcgaggaaatgttcataccgtatggattgtggtatctggaaacgtcctcgcatttgttatgcaaaatgcaacaaagccagtgaaatcactggctcgcgtcttccgaagatgtttcaaatcgcacaaggccaggcggcaatgccacgcttaagatgatcggttgccattctgcccgggcagcaaacttacgcgagtagccgcgcgcaatcaggaacccgccaataccaccgaggatcgcaccacataatgctgcgacgtcagaagcaaagagtagctgaaatagcgaagcgataaggaataatcccaccagcggcgacatataaaccagtaatgcggagctaagcaggctgccttcggcgatccccaattccactttttgccccggcactaacggctcatcacagggtacgacaatggtatgcgtggtttgcgggccaagtttatttaacacgcggctaccgcaaccggcgcgtgaagcgcagctgctgcatgaagctttaacatcacaactgaccagcgcctgcccgttttgccaggagacgacggtagcccactctttgatcattgcgctgccccgaacttaatattctcggcaatgcgtttcgccgtttgcggcggcagttcaccgacaatggtgatttcggcgttatcacgtacgcttgtactgacggttctgcgtccggtgcgcaacatctgatcggtgctcgatggcgtagcgcggttaacgtttaccgagaagctgaataatccgtcggaatagagacgtgattcgataggcatgttgtccatcgtcggtagcggacgtcgactactggaaacttcgctaaaaccctgtggcaaccaggttggcgtccagctgaatttagctttttcacctacaggaacagaaagcaacggcggcaaatttgccttcgccagcgtctgcatactgctgctgatatcctgattgacgttaaaagcaatcacgcgaaattgttccagcgtttcaccatcgcgatcaaggagatcaacccgcatcggtaatttcgattcggtgtccatccacacgatgtagctgtagcgtgtaccatctcgggcaaccacgcgaatgacttcgcaaagacgatcagcaatacgcgtgcgcccgacggagataaagtcgtagtaaggagaaaggcgtttgaaatcggtatagataagcgatggcagagaatcaacaatgtaatcgccattaagcgtgaacggttcaagtcccggttcaaaatagctgatttcattgccgcgctgtaccacttcccggcgcgggccatccatttgcaacaattgtgcaagaggacggttatcgaggcgtgcatgtcgataacgcagagactcaacaccctgtttattgatgctgatgaatgacagctcgtaattcagtgactgactggccaggttcatctgctgtaataacgccccggacgcgggagtggccgaggcgttagcagagaataacaggctacctgtcactaatgacatggcaaaccaaagttgcttcattactgcgattgcgttcctaaagtttgaattcctggcacctgtacagcggcttgctgggtttgcgcctgctcaaactgaagctgttcagagtggagtcggcgttgcagttcgtaatcctgcaacattgcattaatgcgacgacgctgctcctgtacctgctgctgttgaccattgtttgcggtcgcttcagaaggtactcccaggcttaccgggctggctttacccatcatcggcagtgtattaaataccggcgtttcgggctgctgggacgtttcagattgtccattatagtgctggacgccaacgataactgcaagcgatacgcatgcggctacgcccatttgggtaagctgtgccgcccacggacgtactttctgccagaatggcattttctgccattgatgcggcgcaggctgggcttccgggatcaatgtcgccggttgacgtactggctcttcttcaatggcggccatcacgcgtgaagagatatcgaaatggagcacctcgggagtatcaccccgcattgagtcacggattaagtgatagctttcccaggttttctgcatttctgggttatgagccagttcgttaagcagctcactatccagcgtttcgccatccattaaagcggaaagttgttctttctgcatgcctaatacccttatccagtatcccgctatcgtcaacgcctgataagcggttgaactttgttatcaatagcttccctcgctcggaagatacgtgaacgcaccgtacctaccggacaatccatgatagcggctatctcttcatagctcaggccatccagctcccgcaaggttattgccatgcgtaaatcttccgggagggactcaatagttcggaaaactatctgtctcagttcttctgacaacattaagttctcagggttcgaaatttctttcaacgcgccgccactttcgaagttttcagcttcaatggcatccacatcactggaaggtggacgacgcccctgagcaaccaggtaatttttcgctgtatttacagcaatccgatacagccatgtataaaaagcgctatctccccggaacgaatccagcgcacgataggctttaataaaagcttcttgtaccacatcgggaacatcacccgacggcacatagcgggaaaccagactcgccactttatgctgatagcgcactaccagtaagttaaaggctttctgatctcccttctggacccgttcaaccaggacctggtccgttaactgctcgctcatccgaggtaaagtctccccaaaccaaatttccacgcgctatcgaaacgccactccattagctgcaatttgagcaagcaaagggttagagtgtctcgtttttgtaaagttccgtaacgcatctgtttttgtttgtcatgctgtagacggatcattatctatcattataagtctacagaatctgaacatcgcattatctgtgtagaaatgcccatttaactgcctgaagagtaacccaacggcctttttatttcaccacctaatcctccaccagccagtaacttctctttttctcgccgccctgcgtcagcgtgtttagcaactgtaacaaatattaaaatagcaggtgtttatccgcacaacatgatgctatgctgaccaaaccatgtttagtaaattaaacaaagaaaatgaatactctccctgaacattcatgtgacgtgttgattatcggtagcggcgcagccggactttcactggcgctacgcctggctgaccagcatcaggtcatcgttctaagtaaaggcccggtaacggaaggttcaacattttatgcccagggcggtattgccgccgtgtttgatgaaactgacagcattgactcgcatgtggaagacacattgattgccggggctggtatttgcgatcgccatgcagttgaatttgtcgccagcaatgcacgatcctgtgtgcaatggctaatcgaccagggggtgttgtttgatacccacattcaaccgaatggcgaagaaagttaccatctgacccgtgaaggtggacatagtcaccgtcgtattcttcatgccgccgacgccaccggtagagaagtagaaaccacgctggtgagcaaggcgctgaaccatccgaatattcgcgtgctggagcgcagcaacgcggttgatctgattgtttctgacaaaattggcctgccgggcacgcgacgggttgttggcgcgtgggtatggaaccgtaataaagaaacggtggaaacctgccacgcaaaagcggtggtgctggcaaccggcggtgcgtcgaaggtttatcagtacaccaccaatccggatatttcttctggcgatggcattgctatggcgtggcgcgcaggctgccgggttgccaatctcgaatttaatcagttccaccctaccgcgctatatcacccacaggcacgcaatttcctgttaacagaagcactgcgcggcgaaggcgcttatctcaagcgcccggatggtacgcgttttatgcccgattttgatgagcgcggcgaactggccccgcgcgatattgtcgcccgcgccattgaccatgaaatgaaacgcctcggcgcagattgtatgttccttgatatcagccataagcccgccgattttattcgccagcatttcccgatgatttatgaaaagctgctcgggctggggattgatctcacacaagaaccggtaccgattgtgcctgctgcacattatacctgcggtggtgtaatggttgatgatcatgggcgtacggacgtcgagggcttgtatgccattggcgaggtgagttataccggcttacacggcgctaaccgcatggcctcgaattcattgctggagtgtctggtctatggctggtcggcggcggaagatatcaccagacgtatgccttatgcccacgacatcagtacgttaccgccgtgggatgaaagccgcgttgagaaccctgacgaacgggtagtaattcagcataactggcacgagctacgtctgtttatgtgggattacgttggcattgtgcgcacaacgaagcgcctggaacgcgccctgcggcggataaccatgctccaacaagaaatagacgaatattacgcccatttccgcgtctcaaataatttgctggagctgcgtaatctggtacaggttgccgagttgattgttcgctgtgcaatgatgcgtaaagagagtcgggggttgcatttcacgctggattatccggaactgctcacccattccggtccgtcgatcctttcccccggcaatcattacataaacagataaaaagcctgggtcagcgccgtatacgcttcggaatagttctggtctggcccacgaatgactaagcgatcgctaaagcattctcccgcctgcggggagaatgccagcagcacccgatgcggcagtcgcgcttcgttttccgccacatccgtccgcaaacgtaaatgccagcccatgcttaatgccagctccgtaaaaccattaccaatctgctctggcagcactacgcagaaaaatccctcttcggtaatgcactccgccgcacaggtcagcaacgatgggtgatcaagcgtagtggtatagcgagcctgttcccgttgaggtgtcgagcactctactccctgctgatagtaaggtgggttactgatgattaaatcgaagcgtactgtctgctgtgtgatccactgctgaatatccgccgtatggacgttaatccgctctgcccacggggactggttgatattttcctgcgcctgcgcggcagcttcactttccagttcaactgcatcaatcatcacgctgtcatcggttcgctgcgccagcattaatgccagcaacccgctacccgcgccgatatcaaggcaacgttttaccccagccaccggtgcccatgcgcccaataaaataccatccgttcccactttcatcgcacagcgatcgtgagcaacaaaaaactgtttaaaagtaaatccattacgacgaagcacggatgtagactgtgacatgaaaataaaaccttgcaggaaaaacggcgatagcaccgggtgagaacaatacccgagaagcgatatccatacaaacagatgaagattgcagccgtaacgtctataatcagcgccccacacagaggtagaacatgactgtaacgactttttccgaacttgaactcgacgaaagcctgctggaagccctccaggataaaggtttcactcgcccgaccgccattcaggctgccgccattccgcctgcgctcgatggccgtgatgtactcggttctgcgccgacaggcaccggtaaaacggcggcgtatctgctgccagcgttgcagcacctgctcgatttcccgcgtaagaaatccggtccgccgcgtattttgatcctcaccccaactcgcgagctggcgatgcaggtgtccgatcatgcccgcgaactggcgaaacatacgcatctggatatcgccaccatcaccggcggcgtagcctatatgaaccacgcggaagtgttcagcgaaaatcaggacatcgtggtcgccacgaccggacgtctgctgcaatacataaaagaagagaacttcgattgccgcgcggttgaaacgctgatcctcgacgaagcagaccgtatgctggatatgggcttcgctcaggatatcgaacatattgctggcgaaacgcgctggcgtaaacagaccctgctcttttcggcaacgctggaaggcgatgcgattcaggactttgccgagcgtctgctggaagatccggtggaagtttctgccaatccctccacccgtgagcgcaaaaaaattcatcagtggtattaccgcgccgatgatcttgagcataaaaccgcgttgctggtgcatctgttaaaacagccggaagcgacccgctcaattgtgtttgtgcgtaagcgtgagcgtgtgcatgagctggcaaactggctgcgcgaagcgggcatcaacaactgctatctcgaaggtgagatggtacagggcaagcgtaacgaagcgatcaagcgtttgaccgaaggtcgcgtaaacgtactggtcgcaaccgatgttgccgcgcgcggtatcgacattcctgacgtcagccacgtctttaacttcgatatgccgcgcagtggcgatacttatttgcaccgtatcggacgtaccgcgcgcgccggtcgtaaaggcaccgcaatttcgctggtggaagcccatgaccatctgctgctgggtaaagtaggccgctatattgaagagccaattaaagctcgcgttattgatgagttacgcccgaaaacgcgtgcgccaagcgaaaagcagaccggcaagccatcgaagaaagtactggctaaacgtgctgagaagaaaaaagctaaagagaaagagaagccgcgggtgaaaaaacgccatcgcgacaccaaaaatattggtaagcgccgtaaaccaagcggaacgggcgtgccaccgcaaacgacagaagagtaatctcaatgccaggtttaagcctggtattaaaagtgctggcaaacgcaaaactgcctgatgcgctacgcttatcaggcctacgtggctcatgcaatatattgaatttgcacgatcttgtaggccggataaggcgttcacgccgcatccggcatgaataaagcgcactttgtcgacaagttaaatgccgggtttaatcccgacattatttttatccagccacaaaactctcttcaacacactgaataaaagtgtgcatcgccgggctaaccgcttttccagcatgatgtgcgcacatggccgtaatggtctgcgactgttcgccaaaaggcaattcaattaattctccgcactccaactcttttgccaccgcaaagcgcggtaggtagctgaccccgatattcgccgcgacacaacgcttgatgctttcgatacttataagctcaatggtgttttccaccgtgatccgccgctgacgcagcgtgctctcaaatatctgccggaagacacattgcggttcgttgataataaagctacaggcgttatgtcttcccggctcagtaaaatcgacatctgcaatttgcggtgaagccaccagcaccagtgattgttcacccaactctcgtcgattcagagcatcatcattccctacacgataaaagacgccaacatcggcctcatcattcagtagcgcatcacggatcacgtaacagttcagcgactgcaacgataaacgcacttttggggcgcgttgccgaaaacgctgcaacacctgcggcattcggtaagagagcaacgtttcgcccgaaacaacgcgtagttccccgtccggatctgactcctttttggcagcctcacgaagcgtatccatcactcgggtaagttcataaatgtgcggcagcaacttttttccttcgcgggtaaggcacatccgtcggccaattttctcaaataactggactgaaaactcctgctcaagctgctgaatatgaaaagtcaccgtcgattgtgtacagcacaatttttgcgaagctcgcaaaaaggaaccctcttccaccacggttttaagcgtaataaaacggcgcagatccataaccccaaacctatcgaaaatatcgaatctagaatataaaaacattcatttttttaaatgttccgtgtcgggtactgtctaccaaaacagaggagataacaagtgacaccgacccttttaagtgctttttggacttacaccctgattaccgctatgacgccaggaccgaacaatattctcgcccttagctctgctacgtcgcatggatttcgtcaaagtacccgcgtgctggcagggatgagtctgggatttttgattgtgatgttactgtgtgcgggcatttcattttcactggcagtgattgacccggcagcggtacaccttttgagttgggcgggggcggcatatattgtctggctggcgtggaaaatcgccaccagcccaacaaaggaagacggacttcaggcaaaaccaatcagcttttgggccagctttgctttgcagtttgtgaacgtcaaaatcattttgtacggtgttacggcactgtcgacgtttgttctgccgcaaacacaggcgttaagctgggtagttggcgtcagcgttttgctggcgatgattgggacgtttggcaatgtgtgctgggcgctggcggggcatctgtttcagcgattgtttcgccagtatggtcgccagttaaatatcgtgcttgccctgttgctggtctattgcgcggtacgcattttctattaacgaaaaaaagcggaagaggtcgccctcttccgcttagtaacttgctacttaagccttacaggctttcagtaaaggtacgagcgataacgtcgcgctgctgttccggagtcagagagttaaagcgaactgcataaccggatacacggatggtcagctgcggatatttttccggatgcttaactgcatcttccagagtttcgcgacgcagaacgttaacgttcaggtgttgaccaccttcaacgcgaacttctggtttcacttctactggaacttcacggtattcaatgtcacccagtttgcttactgcaaccacttcatcttctgcataacctgcttttgcaacgatgcaacgcgcttcgcctttttcgctgtccagcagccagaaagagttcagcagatcgtcgttagcggctttagtaatctggatacctgtaatcatgtgatgcctccccggcaaaattatttgatttgttcagcctgtcgcggccaattggtaaaaccattgttgcttgagtgtatatatactcctcaaacacccttgaatctttgatttaaatcaataaaaaccacacatcaagtatggtcgcaaatggattttattgttttacatcaacttatgcgggtgtgaaattttaccaatttacatttttttgcactcgtttaagtctaaaaaatgagcatgattttgttctgtagaaagaagcagttaagctaggcggattgaagattcgcaggagagcgagatggctaacgaattaacctggcatgacgtgctggctgaagagaagcagcaaccctattttcttaatacccttcagaccgtcgccagcgagcggcagtccggcgtcactatctacccaccacaaaaagatgtctttaacgcgttccgctttacagagttgggtgacgttaaagtggtgattctcggccaggatccttatcacggaccgggacaggcgcatggtctggcattttccgttcgtcccggcattgccattcctccgtcattattgaatatgtataaagagctggaaaatactattccgggcttcacccgccctaatcatggttatcttgaaagctgggcgcgtcagggcgttctgctactcaatactgtgttgacggtacgcgcaggtcaggcgcattcccacgccagcctcggctgggaaaccttcaccgataaagtgatcagcctgattaaccagcatcgcgaaggcgtggtgtttttgttgtggggatcgcatgcgcaaaagaaaggggcgattatagataagcaacgccatcatgtactgaaagcaccgcatccgtcgccgctttcggcgcatcgtggattctttggctgcaaccattttgtgctggcaaatcagtggctggaacaacgtggcgagacgccgattgactggatgccagtattaccggcagagagtgagtaaatttgcggggaaatgccggatggcagagttgccacccggctgatttatcaggctttattctgacgccaccattcaccaagcaaaacgccggttgcgacagagatattcagcccggcaacgttgcccgtaccgtcaatcttcacgcgcagatcgttcggatcgcgtgcggcatccggtaacccttcatattcctgacccagcaccagtaccattttcgctggcagactagttttgaacagcggtttaccctgctcgctggaagtggtcactacggtgtaacctgcctgacggaaatcatccagcacgttaacaatgttgtcgccagtaatcggctgaacgtgctctgcgccgccttctgcggtacggatagccgcccccgactccagcagtgccgcatcctgcaccacgacacctttcacgccgaagtgcgcgcagctgcgcatcatgccacccaggttatgcgggttagattcgttttccagtgccagaacgcaatcctgcgcgcctgcctggcttacccactgctgcacggttgtaccgttacgctttttgatcaagaagcaaacgccgccgtgatgttccgtgcctgacgcttttgtcaattccgcttcatccaccacatggtacgctttgcggtttgctgccatccagcgcaaagcttctttaaaacgcggcgttacactctggataaaccaggcgcgaacaatcgcttccggacggctctggaaaagtgcctgacatgcattttcgccgtagacgcgggtttcttccgcacgctgacgacgcaacacttccggatcaataaaacttttaccactgatgccaccgtgatcggccttttccggcgtctcatcacccggcgcgcgggaaaccgtgcgccacggcgaatcttcccacttgcggtcacggggctgactctgtttgtcatcgcgggcggggcgacggccaccgtcagcacgagattttcctggacgcccgccccctttcccggtacgcgggttgtgggtacgtttatcagaatcatcatcactgcggacatacatcactttgaccttgccgcttttacctttcatttcatcgttcatgcttttctccaccagcgctgcgcgaagcgcgcagattacccgaagtccgcgcggttcgccatgatttcgtaccaaagcctgcgactatcatacctattgaataaaacagattgttgtctggaacaatgtccccgataatatgtaacatattagaaacataccggcgtcgttgccgataagtctccttactcatcccgaggttagttatgaataccgtttgtacccattgtcaggccatcaatcgcattcccgacgatcggatcgaagatgcggcaaaatgcggacgctgcggtcacgacttgtttgacggagaggtgattaatgcgaccggtgaaacactcgacaaattgctgaaggatgatctacctgtggtgatcgacttctgggcaccgtggtgcggcccctgccgtaatttcgcaccaatttttgaagatgtcgcgcaagagcgtagcggtaaagtgcgctttgtgaaagtgaataccgaagctgaacgtgaattgagcagtcgctttggaattcgtagtataccgacgatcatgattttcaaaaacggtcaggttgtcgacatgcttaatggcgcagtaccgaaagcgccgttcgatagctggctgaacgaatctctttaatcttaccggggcgcatcttgtgccccgttttctcctctgcgacaatggcgttttttcgacgctctcttatgaccgaaaacgctgttctccagttacgcgccgagcgtattgcgcgcgcaacacgtccttttcttgcccgcggtaatcgcgttcgtcgctgccaacgctgtcttttgccagagaaattatgtctctgttcgacaattaccccagcacaagcaaaaagtcgcttctgtttgctgatgttcgacaccgagccaatgaagcccagtaataccgggcgtctcattgctgatattttgcctgataccgttgcgtttcaatggtcgcgtaccgaaccctcgcaggatttgctggagttggtgcaaaacccggactatcagccaatggtggtctttcccgcttcgtatgctgatgagcaacgggaagtgatcttcacaccacctgccggtaagccaccgctgtttatcatgctcgatggtacctggccggaagctcgcaagatgtttcgtaaaagtccgtatctggataatcttcccgtcatttccgtcgatctttcccggctttctgcctatcgcctgcgtgaagcccaggctgaaggccaatattgtactgccgaggtagccatcgcactgttagatatggccggcgataccggggcggcggcagggttaggcgagcattttacccgctttaaaacacgctatctggcaggaaaaacgcaacatctgggtagcatcacagcagaacagttagaaagcgtttaaaatcattcggtcacttctgcgggagaccggtatgagtcagcgaggactggaagcactactgcgaccaaaatcgatagcggtaattggcgcgtcgatgaaacccaatcgcgcaggttacctgatgatgcgtaacctgctggcgggaggctttaacggaccggtactcccggtgacgccagcctggaaagcggtgttgggtgtgttggcctggccggatattgccagcttgccctttacacccgaccttgcggttttatgtaccaatgccagccgtaatcttgctcttctggaagagctcggcgagaaaggctgtaaaacctgcattattctttccgccccggcatcgcaacacgaagatctccgcgcctgcgccctgcgccataacatgcgcctgcttggaccaaacagtctgggtttactggctccctggcaaggtctgaatgccagcttttcgcctgtgccgattaaacgcggcaagctggcgtttatttcgcaatcggctgccgtctccaacaccatcctcgactgggcgcaacagcgtaagatgggcttttcctactttattgcgctcggcgacagcctggatatcgacgttgatgaattgcttgactatctggcacgcgacagtaaaaccagcgccatcctgctctatctcgaacagttaagcgacgcgcgacgctttgtttcggcggcccgtagtgcctcgcgtaataaaccgattctggtgattaaaagcggacgtagcccggcggcacagcgactgctcaacacgacggcaggaatggacccggcatgggatgcggctattcagcgtgccggtttgttgcgggtacaggacacccacgagctgttttcggcggtggaaacccttagccatatgcgcccgctacgtggcgaccggctgatgattatcagcaacggtgctgcgcctgccgcgctggcgctggatgccttatggtcacgcaatggcaagctggcaacgctaagcgaagaaacctgccagaaactgcgcgatgcactgccagaacatgtggcaatatctaacccgctcgatctacgcgatgacgccagcagtgagcactatattaaaacgctggatattctgctccacagccaggattttgacgcgctgatggttattcattcgcccagcgccgctgctcccgcaacagaaagcgcgcaagtattaattgaagcggtaaagcatcatccccgcagcaaatatgtctctttgctgacgaactggtgcggcgagcactcctcgcaagaggcacgacgtttattcagcgaagccgggctgccgacctaccgtaccccggaaggaaccatcactgcttttatgcatatggtggagtaccggcgtaatcagaagcaactacgcgaaacgccggcgttgcccagcaatctgacttccaataccgcagaagcgcatcttctgttgcaacaggcgattgccgaaggggctacgtcgctcgatacccatgaagttcagcccatcctgcaagcgtatggcatgaacacgctccctacctggattgccagcgatagcaccgaagcggtgcatattgccgaacagattggttatccggtggcgctgaaattgcgttcgccggatattccacataaatcggaagttcagggcgtcatgctttacctgcgtacagccaatgaagtccagcaagcggcgaacgctattttcgatcgcgtaaaaatggcctggccacaggcgcgggtccacggcctgttggtgcaaagtatggctaaccgtgctggcgctcaggagttgcgggttgtggttgagcacgatccggttttcgggccgttgatcatgctgggtgaaggcggtgtggagtggcgtcctgaagatcaagccgtcgtcgcactgccgccgctgaacatgaacctggcccgctatctggttattcaggggatcaaaagtaaaaagattcgtgcgcgcagtgcgctacgcccattggatgttgcaggcttgagccagcttctggtgcaggtttccaacttgattgtcgattgcccggaaattcagcgtctggatattcatcctttgctggcttctggcagtgaatttaccgcgctggatgtcacgctggatatctcgccgtttgaaggcgataacgagagtcggctggcagtgcgcccttatccgcatcagctggaagaatgggtagaattgaaaaacggtgaacgctgcttgttccgcccgattttgccagaagatgagccacaacttcagcaattcatttcgcgagtcaccaaagaagatctttattaccgctactttagcgagatcaacgaatttacccatgaagatttagccaacatgacacagatcgactacgatcgggaaatggcgtttgtagcggtacgacgtattgatcaaacggaagagatcctcggcgtcacgcgtgcgatttccgatcctgataacatcgatgccgaatttgctgtactggttcgctcggatctcaaagggttaggcttaggtcgacgcttaatggaaaagttgattacctatacgcgagatcacggactacaacgtctgaatggtattacgatgccaaacaatcgtggcatggtggcgctagcccgcaagctcgggtttaacgttgatatccagctcgaagaggggatcgttgggcttacgctaaatcttgcccagcgcgaggaatcatgagtaaggtactggaaatgttgaccacttaatcgggactggtgttattattgcccgcttatgtcgtctgcattgcacagaggacccttcaatgaacagagaagaaatgcactgtgatgttgtcaaaatttaagcgtaataaacatcaacaacaccttgcccaactacccaagatttctcaatcagttgatgatgtcgatttcttttacgctcccgccgacttccgggagacgctgctggaaaaaatagccagcgcgaagcagcgcatttgcattgtcgccctgtatctcgaacaggatgacggtggcaaaggcattctgaacgcgttgtatgaggctaaaaggcagcgtccggaactggatgtgcgggtgctggtcgactggcatcgtgcacaacgtggacgcattggcgctgcggcatctaacactaacgctgactggtactgccgcatggcgcaggaaaatccgggcgtagatgttccggtttatggcgttccaatcaatactcgtgaagcccttggtgttctgcactttaaaggctttatcatcgacgatagcgtactttatagcggtgccagcctgaacgatgtttacctgcatcagcacgataaatatcgctacgaccgttatcatctgatccgtaaccgtaagatgtcagacattatgtttgaatgggttacacagaatattatgaatggccgcggcgttaatcgtctggatgatgttaatcggccaaaaagcccggaaatcaagaacgatattcgtctgttccgccaggagctgcgtgatgccgcttatcatttccagggcgatgccgacaacgatcagctttctgtaacgccgctagtggggctggggaaatcgagtctgttgaacaagaccattttccatcttatgccttgtgccgagcagaaactaaccatctgtacgccatacttcaacctgccagcaatccttgtgcgcaatattatccagttgctgcgcgaagggaaaaaggtcgaaattattgttggtgataaaaccgcgaatgacttctacattccggaagatgaacctttcaagataattggcgcattgccttatctctatgagatcaatctgcgtcgtttcctgagccgtttgcagtattacgtcaatactgaccagctagtggttcggttatggaaagatgacgacaacacctatcacctgaaagggatgtgggttgatgataagtggatgttgatcaccggtaataacctgaacccgcgcgcctggcgtctggatctggaaaacgccattttgatccacgatccgcaacttgagctggcgccacagcgagagaaagaactggagctgatccgcgagcataccaccatcgttaagcactatcgcgatctgcaaagtattgccgattatccggtgaaggttcgtaaactcatccgccgtttgcgccgtatccgcatcgaccgattaattagccgcatcctgtaatcacaaccccgtcctgtacggggtttgttttttggaggccacgttttgcgtattctttttgtctgttcgctattgttactttctggatgcagccatatggctaacgatagctggagcgggcaggataaagctcaacactttatcgcctcggcgatgctttccgccgccggaaatgaatattcacagcatcaggggatgagccgggatcgcagtgccatgtttggattgatgttctctgtcagtttgggggcgtcaaaagagctttgggatagccgccccgaagggagcggctggagctggaaggatttggcctgggatgtcgccggtgcaagcaccggctataccgtctggcaactgacccgtcactaaagacgcatccccttccctttgcgatgtagcatcaaagaaaccagaaacgccaccacggccatcaaggtcacataccagaagaaggctgtttccattcctattgatttcagcgacaacgctacgtactccgccgaaccaccaaatatagcattagcgaccgcatatgacagaccaacgcctaatgcgcgaacctgtgccgggaacatctcagccttcagtattccactgattgatgtataaaaactcactatcagcagggcacacatcaccagaccaaaagcggcataaggcgaggaaacgttttgcaatgctgagagaataggaacggtaaaaatggctgccagcgaaccgaaacataacattgaggtacggcgaccaatcttatccgacagcgcgccaatgagtggttgaataagcatgaatacaaacaatgcggcagtcataatgccactcgccacgttggcatgcattcccgcagtatttaccagatacttctgcatataagtagtgaaggtatagaaacaaagggagcccgcagcggtaaaaccgagaaccatgatgaatgcacggcgattgcgccataatcctttcagagatccagcttcttttaaagcgcgcgtttcttgttgcgaagtttcatctaactgacgacgtaaccacaacgccacaacagctaacacagctcctaacgcgaaaggaatacgccatccccactctctgagtgcagcgtcttccatggtgtgttgtaaaaccacgacaaccagtagggctagcagttgtccgccgatcaacgtcacatactgaaatgatgcgtaaaaacctttgcgcccttcaacggcaacttcactcatataggtggcgctggtgccatattctccgccaacagataatccctgaaataaacgagcgagaagcaataatgccggagcccacgtacctatagtttcataacctgggaggcaggcgataaccagcgatccgaaacacatcatacacaccgataacagcatcgattttttgcgaccatgtttatcggctatgcggccaaatagccaaccgcctattgggcgcatcaggaatcccgcagcaaaaacacctgctgtttgtagtagttgagtcgtcgtgttcccggaagggaagaagatgtgggcaaagtagagtgaacagaacgagtagacatagaaatcgaaccactcgaccagattacctgaagaggcccccacaatcgcccaaatgcggcgacgagtatcactacttgtcagtttgctgtctgccgttacagtactttcagccatgccattatgtctcctgccgtaatccgatgcttttgtcggtcgcttttgtttattttttttgtaaaggaaatattatacatttgttgcatatcattatgcaaccttaaccatgaatttagttagcaggaaaatggttattgaggagcttaaggataaatttctggtaaggaggacacgtatggaagtgggcaagttggggaagccgtatccgttgctgaatctggcatatgtgggagtataagacgcgcagcgtcgcatcaggcatttttttctgcgccaatgcaaaaaggccatccgtcaggatggcctttcgcataatttgatgcctggcagttccctactctcgcatggggagaccccacactaccatcggcgctacggcgtttcacttctgagttcggcatggggtcaggtgggaccaccgcgctacggccgccaggcaaattctgttttatcagaccgcttctgcgttctgatttaatctgtatcaggctgaaaatcttctctcatccgccaaaacagcttcggcgttgtaaggttaagcctcacggttcattagtaccggttagctcaacgcatcgctgcgcttacacacccggcctatcaacgtcgtcgtcttcaacgttccttcaggacccttaaagggtcagggagaactcatctcggggcaagtttcgtgcttagatgctttcagcacttatctcttccgcatttagctaccgggcagtgccattggcatgacaacccgaacaccagtgatgcgtccactccggtcctctcgtactaggagcagcccccctcagttctccagcgcccacggcagatagggaccgaactgtctcacgacgttctaaacccagctcgcgtaccactttaaatggcgaacagccatacccttgggacctacttcagccccaggatgtgatgagccgacatcgaggtgccaaacaccgccgtcgatatgaactcttgggcggtatcagcctgttatccccggagtaccttttatccgttgagcgatggcccttccattcagaaccaccggatcactatgacctgctttcgcacctgctcgcgccgtcacgctcgcagtcaagctggcttatgccattgcactaacctcctgatgtccgaccaggattagccaaccttcgtgctcctccgttactctttaggaggagaccgccccagtcaaactacccaccagacactgtccgcaacccggattacgggtcaacgttagaacatcaaacattaaagggtggtatttcaaggtcggctccatgcagactggcgtccacacttcaaagcctcccacctatcctacacatcaaggctcaatgttcagtgtcaagctatagtaaaggttcacggggtctttccgtcttgccgcgggtacactgcatcttcacagcgagttcaatttcactgagtctcgggtggagacagcctggccatcattacgccattcgtgcaggtcggaacttacccgacaaggaatttcgctaccttaggaccgttatagttacggccgccgtttaccggggcttcgatcaagagcttcgcttgcgctaaccccatcaattaaccttccggcaccgggcaggcgtcacaccgtatacgtccactttcgtgtttgcacagtgctgtgtttttaataaacagttgcagccagctggtatcttcgactgatttcagctccatccgcgagggacctcacctacatatcagcgtgccttctcccgaagttacggcaccattttgcctagttccttcacccgagttctctcaagcgccttggtattctctacctgaccacctgtgtcggtttggggtacgatttgatgttacctgatgcttagaggcttttcctggaagcagggcatttgttgcttcagcaccgtagtgcctcgtcatcacgcctcagccttgattttccggatttgcctggaaaaccagcctacacgcttaaaccgggacaaccgtcgcccggccaacatagccttctccgtccccccttcgcagtaacaccaagtacaggaatattaacctgtttcccatcgactacgcctttcggcctcgccttaggggtcgactcaccctgccccgattaacgttggacaggaacccttggtcttccggcgagcgggcttttcacccgctttatcgttacttatgtcagcattcgcacttctgatacctccagcatgcctcacagcacaccttcgcaggcttacagaacgctcccctacccaacaacgcataagcgtcgctgccgcagcttcggtgcatggtttagccccgttacatcttccgcgcaggccgactcgaccagtgagctattacgctttctttaaatgatggctgcttctaagccaacatcctggctgtctgggccttcccacatcgtttcccacttaaccatgactttgggaccttagctggcggtctgggttgtttccctcttcacgacggacgttagcacccgccgtgtgtctcccgtgataacattctccggtattcgcagtttgcatcgggttggtaagtcgggatgacccccttgccgaaacagtgctctacccccggagatgaattcacgaggcgctacctaaatagctttcggggagaaccagctatctcccggtttgattggcctttcacccccagccacaagtcatccgctaatttttcaacattagtcggttcggtcctccagttagtgttacccaaccttcaacctgcccatggctagatcaccgggtttcgggtctataccctgcaacttaacgcccagttaagactcggtttcccttcggctcccctattcggttaaccttgctacagaatataagtcgctgacccattatacaaaaggtacgcagtcacacgcctaagcgtgctcccactgcttgtacgtacacggtttcaggttctttttcactcccctcgccggggttcttttcgcctttccctcacggtactggttcactatcggtcagtcaggagtatttagccttggaggatggtccccccatattcagacaggataccacgtgtcccgccctactcatcgagctcacagcatgtgcatttttgtgtacggggctgtcaccctgtatcgcgcgcctttccagacgcttccactaacacacacactgattcaggctctgggctgctccccgttcgctcgccgctactgggggaatctcggttgatttcttttcctcggggtacttagatgtttcagttcccccggttcgcctcattaacctatggattcagttaatgatagtgtgtcgaaacacactgggtttccccattcggaaatcgccggttataacggttcatatcaccttaccgacgcttatcgcagattagcacgtccttcatcgcctctgactgccagggcatccaccgtgtacgcttagtcgcttaacctcacaacccgaagatgtttcacttcagagttgcgaaaatttgagagactcacgaacaactttcattgttcagtgtttcaattttcagcttgatccagatttttaaagagcaaatatatcaaacaagacttaacagtctgttttgagatattgaggtcggcgactttcactcacaaaccagcaagtggcgtcccctaggggattcgaacccctgttaccgccgtgaaagggcggtgtcctgggcctctagacgaaggggacacgaaaattgcttatcacgcgttgcgtgatattttcgtgtagggtgagctttcattaatagaaagcgaacggccttattctcttcagcctcactcccaacgcgtaaacgccttgctattcacttttcatcagacaatctgtgtgagcactgcaaagtacgcttctttaaggtaaggaggtgatccaaccgcaggttcccctacggttaccttgttacgacttcaccccagtcatgaatcacaaagtggtaagcgccctcccgaaggttaagctacctacttcttttgcaacccactcccatggtgtgacgggcggtgtgtacaaggcccgggaacgtattcaccgtggcattctgatccacgattactagcgattccgacttcatggagtcgagttgcagactccaatccggactacgacgcactttatgaggtccgcttgctctcgcgaggtcgcttctctttgtatgcgccattgtagcacgtgtgtagccctggtcgtaagggccatgatgacttgacgtcatccccaccttcctccagtttatcactggcagtctcctttgagttcccggccggaccgctggcaacaaaggataagggttgcgctcgttgcgggacttaacccaacatttcacaacacgagctgacgacagccatgcagcacctgtctcacggttcccgaaggcacattctcatctctgaaaacttccgtggatgtcaagaccaggtaaggttcttcgcgttgcatcgaattaaaccacatgctccaccgcttgtgcgggcccccgtcaattcatttgagttttaaccttgcggccgtactccccaggcggtcgacttaacgcgttagctccggaagccacgcctcaagggcacaacctccaagtcgacatcgtttacggcgtggactaccagggtatctaatcctgtttgctccccacgctttcgcacctgagcgtcagtcttcgtccagggggccgccttcgccaccggtattcctccagatctctacgcatttcaccgctacacctggaattctacccccctctacgagactcaagcttgccagtatcagatgcagttcccaggttgagcccggggatttcacatctgacttaacaaaccgcctgcgtgcgctttacgcccagtaattccgattaacgcttgcaccctccgtattaccgcggctgctggcacggagttagccggtgcttcttctgcgggtaacgtcaatgagcaaaggtattaactttactcccttcctccccgctgaaagtactttacaacccgaaggccttcttcatacacgcggcatggctgcatcaggcttgcgcccattgtgcaatattccccactgctgcctcccgtaggagtctggaccgtgtctcagttccagtgtggctggtcatcctctcagaccagctagggatcgtcgccttggtgagccgttaccccaccaacaagctaatcccatctgggcacatccgatggcaagaggcccgaaggtccccctctttggtcttgcgacattatgcggtattagctaccgtttccagtagttatccccctccatcaggcagcttcccagacattactcacccgtccgccactcgtcagcgaagcagcaagctgcttcctgttaccgttcgacttgcatgtgttaggcctgccgccagcgttcaatctgagccatgatcaaactcttcaatttaaaagtttgatgctcaaagaattaaacttcgtaatgaattacgtgttcactcttgagacttggtattcatttttcgtcttgcgacgttaagaatccgtatcttcgagtgcccacacagattgtctgataaattgttaaagagcagtgccgcttcgctttttctcagcggcgcggggtgtgcataatacgccttcccgctacagagtcaagcatttctttgcttttctctgttgagattctcaggagaaccccgccgacccggcggcgtgtttgccgttgttccgtgtcagtggtggcgcattatagggagttattccggcctgacaagcgaaaaatataaaaactttatcgttcgctcacttttcaggcaaaacatcttaaatatagtcttttccgtctaacttatagacaaaaacgagccccgaagggctcgttttatcatttactggacggcgacaatccggtcttcattaacttccaggcgaatcactttacccggaaccaattcaccagacagtatttgctgtgccagcgggttttcgatctgctgctgaattgcacgtttcagaggacgtgcaccatagaccggatcgtaaccgttctcgctcagcagtttcagcgcctcgtcagaaatgtggatttcataaccacgttcttccagacgtttgtacagacgtttcaactgaatctgcgcaatcgaggcaatgtgctgttcacccagcggatggaagaccaccacttcatcgatacggttaatgaattccggacggaagttatggcttaccacaccgagcaccagctctttcatgtgcgcataatccagttcaccgaagcgttcctgaatcagatcggaaccgaggttagaggtcataatgacgaccgtattacggaagtcgaccgttctcccttgcccgtcagtcagacgcccatcatccagtacctgcaacagaatgttgaagacatccggatgcgctttttccacttcatccagcaggatgacggaatacggacgacgacgcaccgcttcggtcaggtagccaccttcttcataaccgacatatcccggaggcgcaccaaccaaacgagacaccgagtgtttctccataaactcggacatatcgatacggaccatcgcctcgtcgctatcaaacataaagttcgccagcgccttacaaagctctgttttccccacaccagttgggccgaggaacaggaatgaaccaatcgggcgatttggatccgccagccccgcacggctacgacgaatagcgttagataccgcatcaaccgcttcgttctgaccaattacgcgatggtgcagttcttgctccatacgcagcagtttttcgcgctcgctttccatcatgcgagaaaccggaatccccgtccaacgcgccagcacttcagcaatttcggcgtcggtcactttattacgcaacagacgcatagttttgccttcgagctgcgttgcggcttccagttgcttttccagttccgggattttgccgtattgcagttcagacatccgcgccaggtcccccacacggcgagcctgttcaatagcgattttcgcctgttccagttccgctttaatggtctgcgtaccagaaagcgatgccttctctgctttccactcttcttctaactcggagtactgacgttctttgtcgctcagttcttcgttgagcatatccagacgttttttactggcttcatcagactctttcattaacgcctgttgttccagtttgagctggatgatacgacgatcgagtcggtcgagttcttctggttttgagtcaatctgcatacgaatgctggatgctgcttcatcgatcaggtcgatggctttatccggcagctgacggtcagcaatgtagcgatgagacaacgtcgccgctgcaacaattgccgggtcagtaatttgcacatggtggtgcaattcgtaacgttctttcaggccacgcagaatcgcaatggtatcttcaacagaaggctcggcaacaaacactttctggaaacgacgttccagcgcagcatctttttcaatgtactggcgatattcgtcaagcgtcgtggcacctacgcagtgcaattcaccacgcgccagcgccggtttcagcatgtttccggcgtccattgcgccatcggctttacccgcgccgaccatggtatgtaattcgtcgataaataggatgacgttgccttcctgtttggcaagatcgttaagcacgccttttaaacgttcttcaaactcaccgcgatatttcgccccagccaccagcgcgcccatatccagcgccagtacccggcggcctttcaacccttccggcacttcgccgttgataatacgctgcgccagaccttcaacgatggcagttttaccgacgccgggttcaccaatcagtaccgggttatttttagtacgacgttgcagcacctgaatggtacggcgaatttcttcatcacgaccaatcaccggatcgagtttgccctgttcggctcgttcggtaaggtcgatggtatattttttcaaagcctgacgttggtcttcagcaccttgatcgttcacgctttcacctccacgcatttgttcaatcgcttgagtaatgttggcggtggtcgcccctgctgctttcaggatgtcggccagcgtgccgcgagactcaagtgccgccagaacgaacagttctgacgagataaagttatcaccacgtttttgcgccagcttgtcgcaaagattaagaacgcgcaccagatcctgtgatggctggacatcaccaccagtaccttcaacctgcggtaaacgatttaatgcctgattgatatctgtgcgcaactggccagcatttatgccagcggatgttaataaaggactaaccgaacccccttcctgattcagcagggcgctcattaaatgaagtggttcgataaattggttgtcgtgcccgagtgcaagtgattgggcatcggcaagagcaagctggaatttattagtaagacgatccagacgcataactcctcccataacggatcaaagttgctactggagattaaatgaggtcatccctcaattattcaaggttattgaccagattaatgtgaaaagaaaatcacgcgtaccggatcgtcttgattctttaggttatatcagccaaatgaaacttgccatacgaccggtggtcttgtcgcgacgataagagaagaaagtctcattttccgtatatgtacaacggtcgccgccgaaaatttgctcaacacccacgttcgccagacgctgccgggcaagctgataaatatccgccagatacttatcaccatgctgaatgaaagctgcacttgctttagcgtctactgccataaacgcctcgcgaacctccccccccacttcgaacgcgcgtggaccaattgccggccctaaccaggcgagaatattttccggattatcagcaaaacaggaaaccgtctcttccagcacgcctgcgcacagtccacgccagccagcatgagcggcggcgacttccgttcccgctcgattgcaaaacagcacagggaggcagtcggcagtcatcactgcgcaaaccgtgccgggcgtattgctataagaggcatccgcccgttttgaggcataaggttcgccagtgagcttaagcacatctttgccgtgtacctgctcaagccagaccggtttagaaggcaaattgcccgcagcaaaaagtcgcttgcgattctcctcaacgtgatccgggttatcgccacaatgggcaccgaggttgagtgagtcatacgggggcaagctcacgccgccgatacgagtggagctacaggccgcaacaccttttggctgcggccactgcgggacaatcagcttactcataaccagtccacttcatccttatgttcttcgaaatcggcgcgcatcacctcaatcagctccaccatatcttgtggaataggcgcatgccattccatttcgatgccggagatcgggtgataaagacgcagcatggttgcatgtagcgcctggcggtcaaacttacgcagcgtggagataaatgcttccgaagcaccttttggcggacgcggacggccaccataaaccggatcgcccaccagcggatgagtgatatgggccatatgcacgcggatctggtgcgtacgtccagtttccagacgcaaccgcagacgcgtgtgcacacggaagtgttccatgatgcgatagtgagtcaccgctggtttgcccatcggatgcaccgccatatgggtacgtttggtcgggtggcgactgattggctcgtccaccgtgccacctgcggtcatatgaccaatcgccaccgcttcatactcacgagtaatttcacgccgttgcaaagattcgactaaacgcgtctgagccggaacggtttttgccacaaccatcaggccagtggtgtctttatccagacgatggacgatgcccgcacgcggtacatcggcaatgggtggatagtaatgaagcaacgcattcagtaccgtgccatccgggttacccgcgccaggatgtaccaccaggtcgcgcggtttattaatgataataatgtcttcatcttcatagacgatatccagcgggatatcctgcggttcaaaacgcgcttcttcttcaatctcagcgttgatggcaacctgctcgccacccaatactttttctttcggcttatcacaaactttgccgttaaccagcactcgctggtcgaggatccattcttttattcgcgaacgtgaataatccgggaacatttcggccaaagcctgatctaagcgttgaccgagttggttttcggacaccgttgcagtgagctgtactcgttgtgccatatatactgcttcttcgtttatcgttggggttttacggctttgccgtttaatatagtgtgctattgtagctggtcttaaccgggagcaggaacagagaatctcccgtattacattttgaggaaagtcaaaacgtcatgacgcgcatgaaatatctggtggcagccgccacactaagcctgtttttggcgggttgctcggggtcaaaggaagaagtacctgataatccgccaaatgaaatttacgcgactgcacaacaaaagctgcaggacggtaactggagacaggcaataacgcaactggaagcgttagataatcgctatccgtttggtccgtattcgcagcaggtgcagctggatctcatctacgcctactataaaaacgccgatttgccgttagcacaggctgccatcgatcgttttattcgccttaacccgacccatccgaatatcgattatgtcatgtacatgcgtggcctgaccaatatggcgctggatgacagtgcgctgcaagggttctttggcgtcgatcgtagcgatcgcgatcctcaacatgcacgagctgcgtttagtgacttttccaaactggtgcgcggctatccgaacagtcagtacaccaccgatgccaccaaacgtctggtattcctgaaagatcgtctggcgaaatatgaatactccgtggccgagtactatacagaacgtggcgcatgggttgccgtcgttaaccgcgtagaaggcatgttgcgcgactacccggatacccaggctacgcgtgatgcgctgccgctgatggaaaatgcataccgtcagatgcagatgaatgcgcaagctgaaaaagtagcgaaaatcatcgccgcaaacagcagcaatacataacagaaacctgaaacacaaaacggcagcccttgagctgccgtttttttattctgtcagttgtgaaactgaagcgatttagtcgctatcgatctcatcaaatatggctcgctttgagatattcctcaagtaaaaaaacatctcttcctgcgatttctcacaaaaaagattcgttgacaaaaagtgacaaaattatgagattttcatcacacattttgacatcaggaacggtatgctgaattcaccaagacgggaagacaagaggtaaaatttatgacaatgaacattaccagcaaacaaatggaaattactccggccatccgccaacatgtcgcagaccgtctcgccaaactggaaaaatggcaaacacatctgattaatccacatatcattctgtccaaagagccacaagggtttgttgctgacgccacaatcaatacacctaacggcgttctggttgccagtggtaaacatgaagatatgtacaccgcaattaacgaattgatcaacaagctggaacggcagctcaataaactgcagcacaaaggcgaagcacgtcgtgccgcaacatcggtgaaagacgccaacttcgtcgaagaagttgaagaagagtagtcctttatattgagtgtatcgccaacgcgccttcgggcgcgttttttgttgacagcgtgaaaacagtacgggtactgtactaaagtcacttaaggaaacaaacatgaaacacataccgtttttcttcgcattcttttttaccttcccctgaatgggaggcgtttcgtcgtgtgaaacagaatgcgaagacgaacaataaggcctcccaaatcggggggccttttttattgataacaaaaaggcaacactatgacatcggaaaacccgttactggcgctgcgagagaaaatcagcgcgctggatgaaaaattattagcgttactggcagaacggcgcgaactggccgtcgaggtgggaaaagccaaactgctctcgcatcgcccggtacgtgatattgatcgtgaacgcgatttgctggaaagattaattacgctcggtaaagcgcaccatctggacgcccattacattactcgcctgttccagctcatcattgaagattccgtattaactcagcaggctttgctccaacaacatctcaataaaattaatccgcactcagcacgcatcgcttttctcggccccaaaggttcttattcccatcttgcggcgcgccagtatgctgcccgtcactttgagcaattcattgaaagtggctgcgccaaatttgccgatatttttaatcaggtggaaaccggccaggccgactatgccgtcgtaccgattgaaaataccagctccggtgccataaacgacgtttacgatctgctgcaacataccagcttgtcgattgttggcgagatgacgttaactatcgaccattgtttgttggtctccggcactactgatttatccaccatcaatacggtctacagccatccgcagccattccagcaatgcagcaaattccttaatcgttatccgcactggaagattgaatataccgaaagtacgtctgcggcaatggaaaaggttgcacaggcaaaatcaccgcatgttgctgcgttgggaagcgaagctggcggcactttgtacggtttgcaggtactggagcgtattgaagcaaatcagcgacaaaacttcacccgatttgtggtgttggcgcgtaaagccattaacgtgtctgatcaggttccggcgaaaaccacgttgttaatggcgaccgggcaacaagccggtgcgctggttgaagcgttgctggtactgcgcaaccacaatctgattatgacccgtctggaatcacgcccgattcacggtaatccatgggaagagatgttctatctggatattcaggccaatcttgaatcagcggaaatgcaaaaagcattgaaagagttaggggaaatcacccgttcaatgaaggtattgggctgttacccaagtgagaacgtagtgcctgttgatccaacctgatgaaaaggtgccggatgatgtgaatcatccggcactggattattactggcgattgtcattcgcctgacgcaataacacgcggctttcactctgaaaacgctgtgcgtaatcgccgaaccagtgctccaccttgcggaaactgtcaataaacgcctgcttatcgccctgctccagcaactcaatcgcctcgccgaaacgcttatagtaacgtttgattaacgccagattacgctctgacgacataatgatgtcggcataaagctgcggatcctgagcaaacagtcgcccgaccatcgccagctcaaggcggtaaatcggcgaagagagcgccagaagttgctcaagctgaacattttcttctgccaggtgcagcccgtaagcaaaagtagcaaagtggcgcagtgcctgaataaacgccatattctgatcgtgctcgacggcgctaatacgatgcagccgagcgccccagacctgaatttgctccagaaaccattggtatgcttccggtttacgtccatcacaccagaccacaacttgctttgccaggctaccgctgtccggaccgaacatcgggtgtagccccagcaccggaccatcatgcgccaccagcatggcctgtaatggcccatttttcactgatgccagatcgaccagaatacaatctttcggtaaaggcggtaatttgccaataacttgctcagtaacgtggattggcacactaacaatcaccattccggcatcggcaacaatatcagccgctcgatcccagtcatgttgctccagaatccgcacctgataacccgagagggtcagcatcttctcgaacaggcgtcccatctgaccgccaccgccgacgataaccaccggacgcagtgacggacaaagtgttttaaatcctttgtcgttttcactggagtaagattcacgcatcacccgacgcaaaacatcctcaatcagatctggcggtacacccagagcttccgcctctgcacgacgcgaggccaacatagatgcctcgcgctccggaacataaataggcagtccaaagcggcttttcacctcgcccacttcagcaaccagttccagacgcttcgctaataaattcagcagcgctttatcgacttcatcaatttgatcgcgtaatgcggtcaattcagcaaccataataaacctcttaagccacgcgagccgtcagctgcccgttcagatcctgatgaatttcacgcagcaaggcatcggtcatttcccagctaatgcaggcatcggttacggatacaccgtatttcatttcactgcgcggttgctcggaagactgattgccctcgtggatattactttcgatcatcagaccaataattgagcgattgccatctttgatttgagcaaccacggattctgccaccgcaggctgacggcgataatctttattggaattaccgtggctgcaatctaccatcagagacgggcgcagtcccgcctgttccatctctttttcacattgcgcaacatccgcagggctatagttcggcgctttaccaccgcgcaggatcacatggccgtccggattcccctgagtttgtagcaacgcaacctgccctgcctggttaatgccaacaaaacggtgcggctgggcggcggcgcgcatagcgttaattgctgttgccagactgccgtcggtgccgtttttaaaaccaaccggcatggaaagcccggaggccatttcacggtgagtttgcgattccgttgtacgagcaccaattgctgaccagctaaacagatcgcccaggtattgcgggctattcggatctaacgcttccgtcgccagtggcagtcccatattcaccagctcaagcagcaatttacgcgcgatctgcagcccggcttctacatcaaaagagccatccatatggggatcgttaattaaccctttccagccgacagtggtacggggtttttcaaaatagacgcgcattaccagatagaggctatcgctgacctctgcggcaagggctttaaatcgacgagcatattccagagcagtttccggatcatgaatggaacaaggaccacatactaccagcagacgaggatcgcgcccggcgataatatctgaaatgcttttacgcgagtcagcaatctgggcttcttgttgcaggctcaatggaaaagcggccttcagttgttccggagtcattaaaacctgttcgtcggtaatatgtacgttattcagcgcgtctttttgcatgatggcgatcctgtttatgctcgtttgcgatagttgatcctcagcgaggatgacgtaacgataacacataaagtaaagttttcaatccatatttcgtacatttttatttacacaggcaatttagtcgcgctttcaacccttacctctgtatagataaatttacactccctttgaaaacaatccgctatgctttgaaaaaggagaaagaaatgatgaaaaagtttatcgcccccttgttggctttactggttagcggatgtcagattgatccttatactcacgcgccaaccttgaccagcaccgactggtatgatgtcggtatggaagatgcgatatcgggcagcgccataaaagatgacgatgcatttagcgattcacaggcggatcgcggtctataccttaaaggatatgccgaaggacaaaagaaaacttgccagaccgattttacttatgcccgaggactttccggtaaaagctttcctgccagctgcaacaatgttgaaaatgccagccaactgcatgaagtatggcaaaaaggggctgatgaaaatgccagcacaatacgattaaattaattaaaaccccacaaataaattaaacataagattttactcattgtgttttatttctcacattgatgacggtcgcatgaaaaaatgatattttaatgagcattctgaaaaaatatcgatgcatttcgagcgaagatggtggggatccctgaatgcgtttttctcaccgactgttcttacttctgattctcctgctgacgggagcaccaatactcgctcaggagccttctgacgttgcgaaaaacgtgcgtatgatggtttccggtattgtcagttacacccgctggcctgcgctatcagggccaccaaagttatgtatcttttcatcttcacgttttagtaccgccctacaagagaatgccgcgacatctttgccttatctgcctgtcatcattcacactcaacaagaggcgatgatttcaggctgcaatggtttttattttggcaacgagtcaccgacattccagatggaattaaccgaacaatatccgtcaaaggcgttattattaattgccgaacaaaataccgagtgcattattggtagcgccttttgtctgatcatccacaataatgacgtcagatttgccgtaaacctggatgccttatcgcgtagcggtgtaaaggtcaacccggatgtcttaatgctcgcacggaagaaaaatgatggataacgataattctcttaataagcgccccacgtttaaaagagcattacgcaacatcagtatgaccagcatatttatcactatgatgctgatctggttgctgctttccgtgacctcggtgctgaccctgaaacagtacgcgcaaaaaaacctggcactgacagcagcaacaatgacttacagtctggaagcagctgtcgtttttgccgatggccctgcagcaactgaaacactggcagcgctgggccagcaagggcaattttcaactgcagaagtacgtgataagcagcaaaatattctggcatcctggcattacacccgtaaggatccaggcgatactttcagtaatttcataagccactggctcttccctgcccccatcattcagccgattcgtcacaatggtgaaaccattggcgaagtacgcttaaccgctcgcgacagttcaatcagccattttatctggttttcgctcgccgtactgaccggttgtattctgctggcatcaggcatcgcaattaccctcacccgccatttgcacaatggcctggtagaagcgctgaaaaatatcaccgatgtcgtacatgatgtgcgttccaaccgcaatttttcccgacgagtttcggaagaacgtatcgctgagtttcaccgcttcgctctcgacttcaacagtctgctggatgaaatggaagagtggcagcttcgtttacaggctaaaaatgcgcagcttctacgtaccgcgctacatgacccattaaccgggctggctaaccgcgcagcgtttcgtagcggcatcaacacgttgatgaacaattccgatgcccgaaaaacgtcggcgttactatttcttgatggcgataatttcaaatacatcaatgatacctggggtcatgcgacgggcgatagagtcttgattgaaatcgcaaaacggttagctgaatttggcgggctgcgacataaagcataccgcctgggcggcgatgaattcgctatggtgctctatgatgtacagtcggaatctgaagtgcagcagatatgttcagcactgacacaaatctttaatctcccgtttgatcttcataatggccatcagaccaccatgacattaagcattggttacgcgatgaccattgagcacgcctctgcggaaaaattacaagagcttgccgatcacaatatgtatcaggccaaacaccagcgtgccgaaaagctggtgagataacaaggatatatcgatatgataaagcacctggtagcacccctggttttcacctcactaatactgactggctgccagtcccctcagggaaagtttactcctgagcaagtcgccgctatgcaatcttatggatttactgaatccgccggcgactggtcgctgggcttatcagatgccattctgttcgcaaaaaatgactacaaattgctcccggaaagccagcaacagatccaaaccatggcagctaaattggcctcgacagggctaacacatgcccgtatggatggacacaccgataactatggtgaagacagttacaacgaaggcttatcattgaaacgggcgaatgtcgtggccgatgcatgggctatgggtggacaaattccacgcagcaatctcaccacacagggtttaggaaaaaaatatcccatagccagtaacaagaccgcccagggccgcgccgagaaccgccgcgtcgcagtggtgattactaccccttaaaacaccagcaaacagataaaaaagggccagccaattggccagcccttcttaacaggatgtcgcttaagcgaaatcttagttaagacgctctttgatacgagcagccttaccagtacgctcacgcaggtagtacagtttagctttacgaacagcaccacgacgtttgacagaaatgctgtcaactaccggagagtgagtctggaagacacgctcaacgccttcgccgttggaaattttacgaacagtgaatgcagagtgcagaccgcggttacgaatagcgataaccacgccctcgaatgcctgcagacgttttttggaaccttcaacaacccatactttcacttccacggtatcacccggacggaaggaaggtacgtcctgcttcatctgctcttgttcaagttgcttaataatgttgctcataatttaatctcttatcctgggtaaactgatatctcgggggcttacgccatcccatcatgtttatgttgctgttgtgcgtgttccgttttgaactccgccagcaaccttgcttgctcttcagtcagagccaggttttccagaagttcaggtcttctaagccaggtacggcccagcgactgtttcaaacgccagcgacgtatctcggcatggttgcccgacagtaacactggcggaacttccatcccttctaacacctcaggccgcgtatagtgcgggcaatccagcaatccttcagcaaaggaatcttccgttgccgaggcttcatgtcccagtactcccggaataaaccgggaaacggagtcaatcagcgtcattgctggtaactcaccaccactgagaacgtaatcgccgattgaccattcttcgtcaatttcggtttggatcacgcgctcatctataccttcgtagcgaccgcacaccagaatcaatttttgattcgttgccagttcgctgacgcccgcttgatcaagcttgcgtccctgtggtgacagataaatcacctttgcgccttcacccgccgcggcttttgctgcatgaatggcgtcccgcaagggttgcaccatcattaacatccccggtccgccgccgtaaggacgatcgtccacggtacggtgccggtcatgcgtgaagtcgcgaggactccagctctggatgctcagcaggccatttttaactgcccggccagttaccccgtaatcggtaattgcgcggaacatttcaggaaacaggctaattatgccaatccacatagcgccgtcttttaccgtttatccggtggtttaaaaaccaggatcccaatctacttcgattgaacgagtagtgagatcgactttcttgataacctgcccatcgaggaacggtacgagacgttccttgataccaaacgcatctttcaggtttgccttaatgacgagaacgtcattagatccggtttccatcatatcgacgactttaccgagatcgtagccttcagtggttactacctggcagcccatcaggtctttccagtagtagtccccctcttcaagctgaggcagctgcgatgaatccacgacaatttcacaattcgtcagcaggttcgccgcatcacgatcgtcaacgcctttcagcttgatgatcatgtcctgattgtggtgcttccagctttccagctggacttgctgccactgacccgccttctggataaaccagggctgatagtcaaaaatgctttcggcgtcttcggtggaagaaaacactctgagccacccacgaataccgtaagacgaacccatttttcccaaaacgatgggatcaacaggtgcttgcgcggtgagttgtttgctcatcatgaccaccgtgacagattaagctgctttgtttacttctttgatcagcgcagcaacgcgatcagaaatagttgcgccctggccaacccagtgagcgatgcgatccagatccaggcgagtgccttcttctttttcgctagcgattgggttgaagaaaccaacgcgctcgatgaagcgaccgttgcgtgcattacggctgtcagcgacaacaacctggtagaacggacgctttttagcgccgtgacgtgctaaacgaatagttaccataacatcctcttgtgtgaataaaacaaccggaccccatcgaggaacggagtccggtgtcatattaaaagcccgaaaattttactcatttttgcgggaattgcaatcaacagttgctaactctgctgtaaaaggccgtcggcggtgcagccagtttggtgccggagtgcgcgcagtcaccggagcgtacacgcagtacgtgaggatgacgagcacatcccggtgccaaaatggcaaacaagccaggccgattagcgaccagggaagcctgggggcatcatacccttcatgcttctcatcatcttcgccattccgcccttcttcattttcttcatcatgcgctgcatgtcgtcgaactgtttcagaagacggttaacgtcctgcacctgcataccgcaaccggcagcaatacggcgtttacgcgaacctttgatgatttctggcttagcgcgctctttcatcgtcatcgagttgatgatggcttccatacgcaccagcactttatcgtccatctgtgacttgacgttatccgggatctgccccatgcccggcagcttgcccatcagactagccatgccgcccatatttttcatctggcgcagctgctcaagaaagtcgttgagatcgaagccgtcaccttttttcagcttgctggctaatttctctgcctgcgcgcggtcaactttgctttcgatatcttcgatcagcgacagtacgtcgcccatgccgagaatacgcgacgcgatgcggtccggatggaacggctccagcgcctcagttttctcgccaacaccgaggaacttgatcggtttgccagtgatgtgacgaatagagagcgccgcaccgccgcgggcatcgccgtccactttggtcaacactacgccggtaagcggtaacgcttcattgaatgcttttgccgtattggccgcatcctgaccggtcatggcgtcaaccacaaacagggtttcaaccgggttaatcgacgcatggacttgtttgatctcgtccatcatcgcttcgtcaacgtgcagacgaccagcggtatccaccagcagcacgtcgtagaatttcagtttggcttctttcagcgccgcgttaacgatatctaccggcttctgaccaacatcagaagggaagaaatcaacgcccacctgctctgccagcgtctcaagctgtttgattgccgccgggcgataaacgtcggcagaaaccaccagcactttcttcttgtgcttctcgcgcaggaacttaccgagtttaccaacgctggttgttttaccggcaccttgcaggcccgccatcagtacgaccgcaggcggttgcgcagccaggttcagggtctggttctcttcgcccatcgccgcaaccagttcgttacggactattttgacgaactcctgccccggcgtcaggctcttattaacttcatgaccaaccgctttctcttttacgcgattgataaactcacgcactaccggcagagctacgtccgcctccagcagcgccatgcgcacttcgcgcagcgtatcttttacgttgtcttcagtgaggcgtccacggccactgatattgcgcagcgtgcgcgacaaacgatcggttaaattatcaaacattgtctctcgcctggggtggaaacggttggccgcaatcgcgacacatcatcagtattttgccgcagtataacatgaaggcgtctttgttgttatgcaacggttggagcagcgttcacctgacgctatactgcttctctttcttattgctcaaactgtcgacatcactatgcccgtttttgctctgctcgcgcttgtcgcctactccgtcagtcttgcgctgattgttcccggtctgctgcaaaaaaacggcggctggcggcgcatggctattatttctgcggtcattgcgctggtctgccacgcaatcgctctggaagcccgcatcctgcccgacggtgatagcggacaaaacctcagcctgctgaacgttggttcattggtcagtttgatgatctgtacggtaatgaccattgtggcttctcgcaatcgtggctggctgctgctacccattgtctatgcctttgcgcttatcaacctggcgctggcaaccttcatgcccaatgaatacatcacccatctggaagctacgcctgggatgctggtgcacattggcttatcgctcttttcctatgccacgctaattatcgccgccctgtacgcgctgcaactggcgtggattgattaccaactgaagaacaagaagctggcgtttaaccaggaaatgccgccattgatgagtatcgagcgtaaaatgttccacatcacgcagattggcgtggtgctgctaacgctcacgctttgcactggcctgttctacatgcacaacttatttagcatggaaaatatcgacaaggctgtgctctctatcgtggcgtggtttgtctatattgtgctgctgtggggacattatcatgaaggatggcgtggacgccgcgtcgtctggtttaacgttgcgggcgcggtaattctgacactggcctacttcggcagccgaattgtccagcagttaatcagctaaacccagaaaaggagtttcccctggaacacatttctactactacgttgatcattattctgatcatcatggtggtcatttcagcctatttttccgggtccgaaaccggaatgatgaccctcaaccgctatcgtctgcgacatatggcgaaacagggtaatcgctcggccaaacgcgtcgaaaaattgctgcgtaagccagaccgcctgataagcctggtgttaatcggcaataacctggtcaatattcttgcctccgcgctcggcactattgttgggatgcgtttgtacggcgatgcgggcgtggcaattgcgactggtgtgctgacttttgtcgtactggtatttgctgaggtattgccgaaaaccattgccgcgctgtacccggaaaaagtcgcttatccgagtagttttctgctggctccgctgcaaattttgatgatgccgctggtctggttgctgaatgctatcacccgtatgctgatgcgcatgatgggtatcaaaaccgatatcgtggttagcggctctttgagcaaagaagagttgcgcactatcgtgcacgaatcacgctcacaaatttcccgtcgcaatcaggatatgctgctgtcggtgctcgatctggaaaaaatgaccgttgatgacatcatggtgccgcgcagtgaaattatcggtattgatatcaacgatgactggaaatcgattctgcgccaactctcccactcacctcacgggcgcatcgtgctctaccgtgattcgctggacgacgccatcagtatgctgcgagtacgtgaagcctggcggttgatgtcggagaaaaaagagttcaccaaagaaaccatgctgcgcgccgcggacgagatctattttgtgccggaaggtacgccgctcagcacgcagttggtaaagtttcagcgcaacaaaaagaaagtcggcctggtcgtcaacgagtatggagacattcaggggctggtgacggttgaagatattctggaagagattgtcggcgatttcactacgtcgatgtcgccaacacttgccgaagaggtcacgccgcaaaacgacggttcggtgattatcgatggcaccgccaacgtgcgggaaatcaacaaagcctttaactggcatctaccggaagatgatgcccgcacggttaatggcgtcattcttgaggcactggaagagatccctgtcgcaggcacccgcgtgcgtattggcgagtacgatatcgatattctcgacgtacaggacaatatgattaagcaggtaaaagtttttcctgtgaaaccgctgcgcgagagtgtggcggagtaacgaaaacggcccggcattcgcatgcagggccgtgaattattacgaaagcagaaattaagcttttgctttcgctacagtaaccatcgccgcacgaatcgtacgaccattcagcgtataacccttctgcataatgcccagtacgttacctggcgcaacgtcatcagattccaccattgcgatggcctgatgcacattcgggtccagtgggacgttagtttcggcgatcacttcaacgccaaacttacgcacaacatccagcatcgacttcagcgtcagctcaatgccttcaaccatcgcagacatatccgggttagctttatcagccacttccagcgcacgatccaggctatcaatcaccggcagcaattcgttgatgaatttctccagcgcgaatttgtgggctttttcaatatccagttcagtacgacgacgcaggttttccatttcggcttttacacgcaaaatgccgtcacgttcacgggtctgggcttcagccagctgagcttcgagattcgcaactttttcatcgcgcggatccacctgctcagcagaagcttctggctcaactgcctcaatctcttcgtgctgatccatgataatttcttccggggcttgcccctcaggcgttttctgttctttactactcatgaatttctccgcgtttttttcgcattcatctcgctaacttcgcttattatggggatcagtttcagggtttcaagggaagcactcacattgtcatcaatcttcgcaacaaggacctcggaaaaatgaataatcatttcaagtgtattggcattgtgggacacccacggcaccccactgcactgacaacacatgaaatgctctaccgctggctgtgcacaaaaggttacgaggtcatcgttgagcaacaaatcgctcacgaactgcaactgaagaatgtgaaaactggcacgctcgcggagattgggcaactagctgatctcgcggtagtcgttggtggcgacggtaatatgctgggcgcggcacgcacactcgcccgttacgatattaaagttattggaatcaaccgtggcaacctgggtttcctgactgaccttgaccccgataacgcccagcaacagttagccgatgtgctggaaggccactacatcagcgagaaacgttttttgctggaagcgcaagtctgtcagcaagattgccagaaacgcatcagcaccgcgataaatgaagtggtgcttcatccaggcaaagtggcgcatatgattgagttcgaagtgtatatcgacgagatctttgcgttttctcagcgatctgatggactaattatttcgacgccaacaggctccaccgcctattccctctctgcaggcggtcctattctgaccccctctctggatgcgattaccctggtgcccatgttcccgcatacgttgtcagcacgaccactggtcataaacagcagcagcacgatccgtctgcgtttttcgcatcgccgtaacgacctggaaatcagttgcgacagccagatagcactgccgattcaggaaggtgaagatgtcctgattcgtcgctgtgattaccatctgaatctgattcatccgaaagattacagttatttcaacacattaagcaccaagctcggctggtcaaaaaaattattctaattttacgccagcctctttactgtatataaaaccagtttatactgtacacaataacagtaatggtttttcatacaggaaaacgactatgttggcacaactgaccatcagcaactttgctatcgttcgtgagcttgagattgattttcatagcggcatgaccgtaataactggcgagaccggcgcgggtaaatctattgcaatagatgccctcggtctttgtctcggtggtcgcgctgaagccgacatggtgcgtaccggcgctgctcgcgctgacctgtgcgcccgtttttctctgaaagatacgccagcggctctgcgctggctggaagaaaaccagcttgaagacgggcatgaatgtttgcttcgtcgcgtgatcagcagcgatggtcgctcccgtggtttcatcaacggtacagctgttcctctgtcacaactgcgcgaactgggtcagttgctgattcagatccatggtcagcacgctcatcaattactcaccaaacctgagcaccaaaaattcctgcttgatggctatgccaatgaaacctctctactgcaggaaatgaccgcacgttatcagttgtggcatcaaagctgccgtgacctcgcgcatcatcaacagttaagtcaggaacgcgccgcccgtgcggaactgctgcaataccaattaaaagaacttaacgaatttaatccgcagcccggagagtttgaacaaatcgacgaagagtacaaacgtctggcgaacagcggtcaattgctgaccaccagccagaatgcattggcattaatggccgacggtgaagacgcaaacctgcaaagtcagctttacacggctaaacaactggtgagcgaattgattggcatggacagcaaactgtccggcgtacttgatatgctggaagaagctaccatccagattgctgaagccagcgatgaactgcgccactactgcgatcgtctggatctcgatcccaaccgactatttgaacttgaacagcgcatctcaaaacagatttcgctggcacgtaaacatcacgtcagccctgaggcattgccacagtattaccagtcgctactggaagaacagcagcaactggacgatcaggccgactcacaagaaacgcttgcgctggcggtaacgaaacatcatcagcaggcactggaaatcgcgcgcgcattacaccaacaacgccagcaatatgcagaagaacttgcacagctgatcaccgacagtatgcatgcgctctcaatgccgcatgggcagtttacgatcgatgttaaatttgacgagcatcacctgggcgctgacggtgccgatcgtattgagtttcgggtaaccaccaacccaggtcagccaatgcaggctattgccaaagtcgcatccggtggtgaattgtcccgcatcgcactggcaatccaggtcatcacggcgcgtaaaatggaaaccccggcactgatttttgatgaagtggatgtagggattagcggtccaacagcggcagttgtcggcaaactgctgcgtcaactcggcgaatcaactcaggtgatgtgtgttacccacctgccacaagtcgcgggatgtggtcatcaacactattttgtcagcaaagaaaccgatggtgcgatgacagaaacgcatatgcaatccctgaataaaaaagcgcggttacaagagctggcgcgcctgcttggtggcagtgaagtcacacgtaatacactggcgaatgcgaaagaactgcttgcagcgtaaacttttttcctgcttcacggtcagagtaaacagcaaaacgccgtaagaccggaaagcaaaaggttttaaagtgatgaaaggtctattatcatcggcatattacagatgagccacgtactgctcgggcccgaaaaggaatcaaatcactatgcgctgtaaaacgctgactgctgcagcagcagtactattgatgttgaccgcaggctgttccactctggagcgagtggtttaccgtcctgacatcaaccaggggaactatctgaccgctaacgacgtatccaaaatacgtgttggcatgacgcaacaacaagttgcgtacgcattgggtacaccgctgatgtccgatccatttggtacgaatacctggttctatgtcttccgccagcaaccaggtcatgaaggtgtaactcagcaaacgctgacgctgacctttaacagtagcggtgtgttgaccaatattgataacaaacctgcgctgagtggtaactaataataaagttgctctcaaagacgttaaaaaaggtgctcaatgagcaccttttttctgtctgttatttattcgctgatttttctgctcgttgcctgcgaagctctttcggatcggcaatgagagggcgataaatctccacccgatcgccatcatgcacactatcgcttagttttgccggacggctgtaaatgccgactttgtttttagttaaatcgatatcggtacgcaattccagcaagccactggcgcgaatagcttcttcaaccgtcgcgccctcctgcagcgtcactcgctgcaggtactgcttctcaggtagcgcataagccacctcaacggcaattttacctggcactgtaaacctctttcgcacgaaccgtaaaagcctggaccatattagccgccagctctttaaacacgcgaccaaaggcgagttcaatcaacttattggtaaactcaaagtcgagatgaaactcgatacgacacgcctcctggctcagcggcgtaaacttccatccaccaatcaatttcttgaacggcccatccaccagattcataagaatactttggttactggtcaactggttgcgggtagtaaacgttttgctgatcccagccttagagacatctaccgccgcagtcatctgcccaggagtggactccagaatccgacttccggtacaacccggcaaaaactgaggataagactgaacgtcattcactaactgatacatttgctccgcgctgtagggtaccagtgcggtccggctaatctgaggcataacaatttccatcaacaaaaatccaacaaataatatcatttatcctgctgtaaaaaaaacgctatcccggcgctgggtaacatcgggttcatgctaagatagagccttgtcccccgcaggattgatatggggtgttttcgatttcagattaccgatgattcacgacgcttatgacgaagaaaaaagcacataaacctggttcagcgaccatcgcgcttaacaagcgcgcccgtcacgaatactttatcgaagaagagttcgaagcgggacttgccctgcaaggctgggaagttaaatccctgcgcgcaggaaaagccaatatcagcgacagctacgtccttctgcgtgacggagaggcatttctgtttggcgctaacatcacgccaatggccgtggcctccacgcatgtggtgtgcgatcctacccgtacccgcaagttacttctcaaccagcgcgaactggactcattgtacggtcgcgtcaatcgagaaggctataccgtagtggcgctctccctgtactggaaaaatgcctggtgcaaagtgaaaatcggcgtcgccaaaggtaagaaacagcacgataaacgttcagatatcaaagagcgcgaatggcaggtggataaagcacgtatcatgaaaaacgcccaccgttaaacctgcactccaattattgaccagttcctcaccgcgcctccctctccggcggcgcgaatgaacatcttattggctatcacatccgacacaaatgttgccatcccattgcttaatcgaataaaaatcaggctacatgggtgctaaatctttaacgataacgccattgaggctggtcatggcgctcataaatctggtatacttacctttacacattggggctgattctggattcgacgggatttgcgaaacccaaggtgcatgccgaggggcggttggcctcgtaaaaagccgcaaaaaatagtcgcaaacgacgaaaactacgctttagcagcttaataacctgcttagagccctctctccctagcctccgctcttaggacggggatcaagagaggtcaaacccaaaagagatcgcgtggaagccctgcctggggttgaagcgttaaaacttaatcaggctagtttgttagtggcgtgtccgtccgcagctggcaagcgaatgtaaagactgactaagcatgtagtaccgaggatgtaggaatttcggacgcgggttcaactcccgccagctccaccaaaattctccatcggtgattaccagagtcatccgatgaagtcctaagagcccgcacggcgcaagccctgcgggcttttttgtgccctcaatttgtcccgcgaagtccgaagagaactaattaaatccgaaccttttaggcccattgataggcccaacgaaaagctctattgtttacgttgggcctaaacgcagggagactccccatggcaagaaaaaccaagccgttaactgatacggaaatcaaagccgccaaacctaaagatgccgattaccagctttatgacggtgacgggcttactctgttaatcaagtccagtggcagtaagctttggcaattccgttactatcggcctttgaccaagcagcgaaccaaacagagcttcggtgcctatcctgccgtctcgctttctgatgcacgtaaactcagagccgaatctaaagttttattggcgaaagacattgatcctcaggaacatcagaaagaacaggtgaggaattctcaagaggccaaaaccaataccttcttgttagttgccgagcgttggtggaatgtgaagaaaaccagcgtaacagaggactatgccgacgatatctggcgctcgcttgagagagatattttcccggcaatcggtgatatcagtatcactgagattaaggctcatactctggttaaagcagttcagccggttcaggccagaggtgcattagagactgttcgccgcctttgtcagcgtattaacgaagtcatgatttatgcgcagaacacaggcctgattgatgctgttcctagtgtaaatatcggaaaagctttcgagaaaccgcaaaagaaaaacatgccaagcatccggccggatcaacttccgcagctaatgcacaccatgcgtacggcaagtatcagcatgtccacaagatgcctgttcatgtggcaacttctaaccatcacccgccctgccgaagctgctgaggctcgatgggatgagatcgatttcaatgctagcgaatggaaaattcctgcagctcgaatgaagatgaaccgggaccatacggttccactatctgatggggctcttgctattctggaaatgatgaagcctctcagtggtggccgagaatttatctttcctagccgtatcaagcccaaccaaccaatgaatagccaaacagtgaatgcagcactcaagcgtgctggcttaggaggtgtacttgtttcacacggcttgcgttctatcgccagtacggcactcaatgaggaaggatttccacctgatgtcattgaagcagcgcttgctcatgtagacaaaaatgaggtgcgtcgcgcttataaccgcagtgattatcttgagcaacgtcgtccgatgatgcaatggtgggctgatctcgtaaaagcagcagatagtggtagcatcgttttaactcatttgagcaaaattcgtcttgtcggataaaatatttatcagcccagctctctgggctgatatttctaaaagatcgcactaaatagctacgcggaatagtgctctactttcgtttagccctttcagaggtaagacattagggcaatttcactgtatgactgcgcagtcatcgagtctgtggggtgttgctccttttgcaacgtatcacttgtcaataaatagaaagtgtagatgtattaggcgcagctatttagtctatatggcaagtagtaattatttacttcttttttttctacgaacagcgctatcgaaagcttgttttacatcttcattttttaaagaccattgatttaaaatagtatcaaccaaagcatcttgactcattgttgctacacgatattttttattttgattatttatctcaaactctgacatttgaataaaatcccatagcggttcgataagttcattaactgctacaaccttatttttccacccatcattcggaacagagtcattaattagctcaaccaacttcagttgaatgatatggtacacttccgctttgcttttgccacccttctttcctgcactccgcctgacttctgataattttttttgattacaaacagagatgttaaaccaagtcatacctatgcacttatcaaataactccgcagcccgatgaaatgctttaaaggcaacgttttcattttcagacatgatagattttccccagaaaaaagagattgaggcgaacataaggtgtgccttgaaaatgtcattaatggaaaatggctcgataacaagaggtaaaaacgtttccttggtaaggtttgaacttagatttttccagcattcttgagctggatcatataattcagtgtattcttcctttatctccagttgcccattcactgtatggtgccttgtttcccatggtacatcgcaggaatataacctcacacgagtacctattttctcagagctccagaattgctctcgcattctgcctagctcaatccgtatttccggatgatcttcctctagaacatcagtatccaccgcccattcgcattcggacatgtgataggcgagatcacgtcgttttctacaaatttgttcataaaaatcattcagagaaatcataaaaccaccataaatcaatgtattagaggttgtaaaaattgtatttttggtacatgggttttttgccttaaagatacccattaatctctctgcaaccaaagtgaaccaatgagaggcaacaagaatgaacaatcgatcggccgttagaatactacggttaccagcggttatccaaaaaacaggtatggcacgggccaccatctatgactggttgaaccccaaatcaccacgatacgatgccacctttcccaaaaagcgaatgctcggcgtgaaatctgtcggatggattgaggccgagattgatgagtggttatcacaacgctgtaaacttatttgagggtgttacatgaattcatactcaattgctgtcatcggagtgtaaacatcctgctatttccgccattaatagcggaatagccatatttgctaaacaatttcttaatttaattaaataagaggcattgcatgttcaatggtcgtcctttccctgtagatgcatttcctaaaattatcaggaatgcaatttatgaagtggaacagcatacgcaggcccctcaaggtttgattgctgcttctgctcttggggtaatttctcttgcctgtcagaaccggattgatgtttgccgattgaataatctacgtggcccggtatcacttttcttaatgactctggctgaatcaggtgaacgtaagagtacggttgataaactgctgatgaagccattatatcaactggaagaggatttatttgaaaaatacacccacgatcttaccgcatggagaaatgatgaagcaatttttaatattgaaaaaaaagcactgatgtcaaaacttaaatcagatattcgacgtaacaaagatcacttggcaacaaatgaaagacttaaagaactacttacgacaaacccgaaagctccagtgagattcaaatttttatttaacgatgccacacctgcagctattaaagctcatctctgtgggcactggcgatcagtcggcatcatgtctgatgaagctgggatcatttttaatggttacacacttaacgagctgccgtttatcaataagatgtgggatggttcaatatttacggtggaaaggaaaaacgagcccgagaaattaattagagatgcaagaataacactgtcgctgatggtccagcctaatgtttttaagggttatatcgacaggaaaggagatatggcaaaggggattggattttttgcacggtgcctcatgtgccagcctgcttcaacacaaggtaacagaaaaatttccaacccaattttttcaaatgaacatttgccggtatttcaccaacgtcttatggaaattgttaatgagagcatcattaaaattaatgaaaataatcgcatctgcctccgattctctgcagaagcagaaagacattggatcgaattctacaaccaggtcgagtcagaaatgagaatgattggccttctttatgattttaaggattatgcttctaaaatggcggagaacatggcgaggcttgctgccttacttcattacttcagcggtgatggaggcgatatatctgttaccgcagtaaaagcagcagtggagatagtggcttggtatattgaagaatacatccgcttgttctctaaaaaagaagagttttctttagatgtttcagaagcagatgagctttattgttggataaaagattactgcacgcaaaaattttcttcctgcatcaagaaaaatattatcttacaatttgggccaaataaatttagaaatcgtgacaaggcaaatgaattaattagaatcttaatttcacaaaacaaaatatttatatcttcatggggtaaaacaaaaataataaacataactcattgtgttttttgattttaatgacaatctaaaaggacttaatttaagagtaaaaacaaactctaaacccagttcggataaaagcttgtcatcttgataggtaatatataggtacatagacacatcagaacgatcacttactccaatatcattggccaggatactatatgacatacgatagtgaattcggatcacatgtatccctatatcgggatagaatcaaacaggttattgatgactccctaaacgaacatcttaactcaatgattctacgtgttgatctgcatgacccaattgatacagaaaatatggataacccattctttcaacccagggttgactctggtgctatatctcgctttaccagtgcgttaaaagcaaagcttaaacatgataagcatattaaaactcaacggaaagactggcctgatagtcgacattccactttacgttacgcatgggtcagagaatataccaaaaatagaaagcggcattaccatttgatactgtgtttcaatcaggatgcttattatcatttaggtgattacgacttaaaccgtaacacgttacgtacaatgataacgacagcttggtacagtgcacttggcatccctatagatagctcggggaagttagttaattacccgccaaatggcaaataccttctcaatcgtaaaagggacaactttgagcagacttatagcgatttgatgaatagggtggattacatgaccaaagtaaggactaaaatagtcggtgacggagaccgtaatttcggctgcagtcgcgggtaatttattttttacaacaatggcctttcttatggctggaaaggcctgatttgtttgtattaagatatcggtaatcttttgatggttggaagcccgtcctggtagacgacctagcctaccgaagatgtgagttattcaaaaatgtcgctttcccgcgttccgtagacaaacgtacctaaatcaatgtcgtctaataccgagcgcgcgcctgataaacatctgatcaacgtacccaatcgatctactccaaatgtcctgagtatcccgaagatactggctcaactcatccacatcagcctcgtcggaaaattccagcaagtctaccagtcggtgtaacgtctgaatgggaatgccaatctcttctaaggcattgacacctggtggtagatggaaactttcgaacgccaatttgacatgtgtgtaatcgactttgctgcgtataccacgctttacagcgtggtgtttaactacatcctccatcaagctgagcaccttaggtagggtatagccgaaggtattggttatgagcttcaaatcattgttgagggcaatggaaagagtacgtttctccccttcagaaatccactgtcgtgcataatcgatctgatttttcagatattccgaataactttcagcacttaaatagccggcaagttttgcgatcatgacatccgtaggcttaacagggaccccattgcgactgaacgtatggggaaccagtctggcaatgatctttgcaaaggtcttgaggaagtttgtcgcgggagtccagtgaaacactaacgaggaaaattcgttatcgtccatcatctcgaacatgctttgcagcatttcgaactgctcgacacggaagtacgaatgcttcttcacaaggtcgatggaaacacggtcgtttatgaaaacctcatcaaagcgatcctgtgaaaactcggacaagtggtctggttgaacgctggctaacaggttgattggggtatcaatgccctgaataccgagcggaatatccacctcttgattgagattgtcttccgggatttcctccaggcaaaagattttgccgacgaagtgaacgcccatgcgcccggcgcgacctttgatgttcccatgggtgaatttgtcaatgctgcgagttccatcgcggttgtcgtagatcacaacgttcttagcgatagtgttgactccttcaatgatcgtggaggtgcagagcaaaaagcgcagttttccagcattgaattggtcggcagtgtattgctgcagtgccctcggtagcgcgccaaaatgcaagccaataccgtttctaagggcgactgtgtaatcccagtcggcatcgaactcttcgctgacccagtcgacatggggattctcagtcggagtgccatgcccaagcctgatcagctcgcgcgccaccaggcccgcaacagttggtgacttgcaataaatgatcgttgcgtcgacacatgcgtgcgcgatttcccccagcgctttgagcttggctttgtcgtcattcgctttgatgccgaacgtcttaacatctagcgcgactgtattgaagtcggtagaaacgaaagtatgcggatatccaagtttttcgagaccgcgaatgctgttaacgaacggtcccgtcaggtaaaactgcctggagaccttaagcagtttgcttaacgcaatgttgagctcgatgactcgttcgtcttgatgatcaatgtccccgcttttcagttgtcggaacgccaacttgtaaaactcgtcaatgacgaagaggtcaatgtcgacgatgtcgtcacgctcgttcactcgctcctgagttaacacataaacagcctgatcggaatggcacacttgggaactgtggtggatgatctgatatcggtcaccgaatcgctcttgcagtcggcgacgggtttcgtcggcaagagccacggttggaacaaccagaacaagccgtttcaaagttcccatgccgagcaatgaatcgacgattgcacttttgcccatgcttgtaggtgcactcagcaccacgttttgaccagacttgagcagatcgaatatgtggaactgcattgagtggaaaacataaccatccgagaatggcgtccggtatagctcaagcaccctcaggtcatccggtgtcaggctggtgaactcctttttgagatacgggaacaaacctgattttctcaccatatttttcaaaattgtggtgtgctcggaaaaccgctcgcgcgaatcgagagctcgcacgatcaagtcccgtcccaagtcatacgaaacagggttagacaacagcttgttaaccgcaaacagataattgaacgatgagaagtcctcaccctgcaggctatgtttcgcctgttcatagatctctgtcatacgacctctctcaccttctcatcaactaattgggttaaccgctcaagactcggggctggataaatgaatacgtggatgcaaagattcgcaaacggcgaatcctcgatgaggtcagccgcgaatttttcgaacagcaccgctgtttctttctccaggtcatcctcgaaccccggcgtttcaggctcggttagtagattagagtcgtagcccacgaacagaacaaacgtgaaacgatcgaggtgagcatcgaaaggttggctgccatcaagaatttcgtcaatgtcgtggcgaagcaggtagttatcgtctttaatgtcgaggatttttttgcgcgcggtatcgatgcaatccgaaatgtcctcgtacaactgatcccgtatctccggcaatctgacggcaatgttaatatcagtcaccaactcgctgaagccaatccaaagctgatcaccttctggatcgcggcgaacgatatgcacgttttcaagaattttttcggcccctgctttttccacgtatagcatgcaaggaataggctggctttcgtggtgctgccggatcgttgcgtgcaacagcactcgacccaaaaattcgctgacgtcatggagcgatttgaagacggaattctttagtcgttctcgcttttcaatgaatgtcagtttatgaatatcagacatttcttttggtcggagaaaaacctcatccaaccattgacagacgttatccgcgatgtgcttgtagcggtatttcttaagtgagtactgctgatgtagaacctggcctttacgcttagcgcagaccgaagccataggcgctctaaatggcgtaaggatgtggggtaagtcccgtttgacgtagattttgcggcctgaccgagattggtcatcttcgacacgctgcttgaaccactcaagtaggtctggtcgtaagtaggacttgtcatcagcactgtgaatgcgtcgagaatgctcgcccttgcgcgtcacagtatcaaggatgcggcaccaaatgtcttcggcgacggtttcggaactgagaatgaccccatgtagatcttgggaggccagccgtatgttcttgatccctagaagttccagttcgcgcagggatgaaaacacttcccatgtagccgcatcgatccaatctgaaacgcttatacctgagtctgttaaaaaattgtctgtgcgtttgttgaggtcatcgatgagttcctgtcgacctggcttatctagtcgggcgtttgggctgatcgtcaagtactcaagggttttgttgaccttttcctctgtgacgatggagtacctacgtccaagggacaggtcagactcacactgcattgatttgtgcaaaattgaactgcaggggatcgtctttttatcagcaccttttgaattctgaacgatgtccgaaatgttccaacgtgttttgccggtgctttttacctgaacgaagtcgatgtatccatcagatacaatgtcgatatcgtctgtgacctcgcagcgcacactgcggatagtcttgtcacgaagcattcgggtgacatggtaagcggctacgcagtcctgaaataagaaaccgtgcttggcggctactccgcctgaatcgttcgactccatttagacatccgtgacaattttgcgaaaattaaggagatgttatgacacagtccaatcggatcactgcatcatcaccagtgatctaaatacttcacagccattctcggtcgcaggtatcaagcttttcaggattccacaaatattgtaaccctgacgtctaatttggttatataacatactgccccaactaacgtaaggtaggcacagccttaatcaaggttttggttttcaaatagttcagagctgagaccgccaaccgcactatggcactatggcactatggcactatggcactatggcactatggcaccgccagcgattgtaatcacacttgatattataaaacacagttgcacgcattatttcctggttggtagggtcatatctcgatgctctttgagcaatgtcaacatcgcgtgttcatggctttctatattgttgatgccttgcccatccggaccccactccttatagctcatcatgatggcttgttttgggctctctgctcgttctgtttcgacgtagaattttttcttgtctgctggcgaataattactaagtatcgagttgctgcttggtgagatcaggaagaggttaccgaaacgatggacatcatcccccattttgtggactgcccccccggtagacgatcctgccctatagttggagtgccccctattcaggtggctaaatttagcaaatcaatacacttcaggggggtattattgtagagtttccccatatgtttctatgggatccaggaaatgacaatcaggagttacaaaaacttaaatctggtcagggcaaatatcgagactgaatccagacaattcattgaaaataaaaactattcaatccaatcaattggtcctatgccagggtcaagggctgggcttcgggtcgtatttaccagaccaggggttaacttggcaactgtggacattttttataacggggacggttcgactacaattcaatatctcactggagccaatcgttctctgggccaagagttagcggatcatctttttgaaaccatcaatcctgctgaatttgagcaggtaaatatggtactgcaaggatttgtagagacaagcgttctacctgtacttgagctatcagcagatgaatcgcatatagagttcagagaacactctcgtaacgctcataccgtagtgtggaaaattatttccaccagctatcaggacgaattgactgtgagcctgcatatcacaacaggtaagctccagattcagggccgaccgctgtcatgttacagagttttcacgtttaacttggcagccctgcttgatttacagggtttggagaaagtgctaatccgccaggaggatggtaaagctaatattgttcaacaggaggttgcccgcacttacttgcagactgtaatggccgatgcttacccgcatctccacgtgactgccgaaaaattgctcgtttcagggctatgtgttaaactcgccgcccctgatttgcctgactactgtatgttactttatcctgaactacgcaccattgaaggtgtcttaaaaagtaagatgagtgggttaggcatgccagtacagcagccggcaggttttggaacttactttgataaacctgctgctcattacattctgaaaccgcaatttgcagctactcttagaccggaacagattaacatcatcagcacagcctatactttttttaatgtggaacgtcattctctgttccacatggaaactgtggtcgatgccagccgtatgatttctgatatggcccggttgatgggtaaagccactagagcgtggggaataatcaaggacttatatattgtttgaaatcaccggaattaacgtctcaggggctctaaaagctgtcgttatggcgaccggcttcgagaaccctttgtcctcagttaatgaaattgagacgaaactttctgccctactgggtagtgagaccactggtgaaatcctttttgacctcttgtgcgctaacggtccagagtggaaccgcttcgttacgctggaaatgaaatatggccggatcatgctggatacggccaaaattattgatgagcaggacgttccgacacatatcctgagcaaactgacttttactttacgtaatcatcctgagtacctagaagcctctgttttgtctcccgatgatgtacgccaagtcctgtcaatggatttttgaaactcttctttctaaacgaaccagtatagaattcgcccttttggcatgatattaacttgtccaatatgatcaaatagcattaaccccccctcacaacgtcctgcatagggaacacgttttcccctgtgcacccacgactaaatttccccccctttaaacttctcaataatgtcaccaattttctggaaatcctatgatgcctttcccggtaaatggtgctgtgagttcagaaagattctgcaatctatgtgcattgaaaaaatcttcagatagatatcattctcctgaacaatccgatgaacggcagaacctcgcggttctgccgtttttgttttacttttcagaggagtggtgatgaaaaattttgaagttctgcagccactacagaactccctttccggtctaccgctatgggtatctgaacgtatattgcagcagataaatcagttaacccactacgagccagtgatcggcatcatgggtaaaactggggcgggaaagagtagcctttgcaatgccctgtttgccggtgaagtatcgccggtcagcgatgtagcggcctgtacacgtgatcctttacgctttcgcctgcagattggagaacactttatgaccatcgtggatctgcccggcgtgggcgaaagtggcgttcgcgataccgagtatgctgcgctgtaccgcgaacaacttccccggctcgacctgattctgtggctgattaaggctgatgatcgggcactggcgactgatgagcatttttaccgtcaggtgattggcgaagcataccggcataagatgctgtttgttatcagccagtcagacaaagctgaacccaccagcggtggaaatatcctttccacagagcagaaacaaaatatcagccgcaaaatctgcctgctgcatgagctattccagcccgtgcatccggtgtgtgccgtgtcggttcgcctgcagtggggactaagggtgatggcagagcggatgattaagtgtctgccgcgtgaggccagcagcccggtagtagcgctactgcaacatccctttcgaacaacggtagcccgggagcaggcacgtgacgatttcggtgaaaccgtaggtgccatactcgatacggtaagcacctttccccttattcccgccccggtgcggaccattattcaggccgtgcgttcctcggtggtgtcagtggcccgcgctgtctgggatttcttcttctgagtgtttaattctgccctattattctccgagccctgtcgcaagtgcggcagggctttctttatttgttttacccatactgaggagtctgcttatgacccgtctggcttcgcgctttggcgctgcaaatcttattcgccgtgaccgtccgttaacccgtgaagagttatttcgcgtggtgcccagcgtattcagtgaggataaacacgaatcccgcagtgaacgctacacgtatatacccacaatttccctgctggacagcctgcagcgggaaggcttccagccattctttgcctgtcagacacgggtacgtgacccccgtcgtcgtgagcatactaagcatatgctgcgcctacgtcgggaggggcaaattaccggtaaacaggttccggaaattatcctgcttaactctcacgatggcaccagttcgtaccagatgctgccgggcatgttcagggcggtgtgccagaacggtctggtctgcggcgagtcgtttggcgaggtgcgggtgccacacaagggggatgtggtgagtcaggttattgagggggcgtatgaagtgctggggatttttgagcgtgtggaagaaaagagggatgccatgcagtcgttgcttttaccgccacctgtgcagcaggcactggcaaaagcagcgcttacgtatcgctttggtgaggaccaccagccggttactgaatcgcagatactctccccacgccgctggcaggatgagagcaatgacctttggaccacctatcagcggattcaagaaaacctgattaagggcggactcagtgggcgtaatgctaaaggcggacgaactcatactcgtgccgtgcgtggcattgacggggatgtgaagcttaaccgtgcgctgtgggtgatggcagaaacactgctcacgcaactgcagtagacgtttcatgttgccacgttgttaatatcggacaccacctgtccgcatcgctatgtgctcgtgtgcctcaatcccccggttatagcttttaacccccgttacatctggcttttgcagaaataaaaaatagtttctgcgttgtccataccctgtccgcccccctctttaaagtaatcacatcattttcagtcagttaactttcctggagaatctctcatgacacaggcagaacgccgccatgaccggctggctgtcaggctgtcactgataatcagccgtctggttgcgggtgaaacgttgagcgtgcgcaaactggcggctgagtttggcgtgtcagtgcgcacgctgcggcgtgattttcgtgaacgactgatgtatctggacctggagtatcagtccggatactgccgcttacgcactgctggcagtgagatgcagatggtgcccgacgtgcttatctttgcccaccgcagcgggctggccgggctttttcccggccttgaccgccgtctggtgaatgcactgctgatgtgcgatgagtctccctgcgtgatagcaccagccaatccggttccttcgccttcaggagcattgtctttctggagactgattcaggccattaccgggcgcaggcgggtgacgctgattgcagaggggcgacgctgtgagcgcctagctccctgccggttactcatccaccagcagacctggtatctggtggctgaacacgaagggcatatcgccgtattcacacttgatgaaatccatctgattcagcctttgcaggagacttttcgccgcaatgacagtctgtgtcgcctggttgaagacccggtcttcattcaggccttaccccattttcgctttatccagcattcactgcttacgtttgttccggccgacagcccaccggaatagcgcaggcgttgttatcaacccggcaacatggaggagcccagtgcccgttattgccattatcgccattgttatcatcgtcatcattctgaacaaaaccggagtgtccgacagcctcacggccctgacacttgcaaccgttgccgcactactgacgggaggtggtgcagccggtgctgccagtgtcgcgctgacgccgttcgtcggcgtgccggtgggtatttttgtgggaatttatgtctttgccaaagtggttcgtctgatttcagggaaaaaataatgaaacgtaaaacactacctctgctggcgctggttgccacctctctgtttctgagcgcctgcgatgacaggagtgatgacctcaaagctatcagtaaatttaaggacctcacgcccccgcgcttcagcgatgtggtcagccgtcaggatgatgtcagcgaagaatggtcacaggttggcttctcatccggtctcaccctgcaggtcttacgtacccgtgagtcgcccgatggttgcgagggtggcagttactactatctggtagatatggaggagaaaaccgtccagccgctgatgaatgcgctttgtattgccgacaatatcaaactggaataccacgaagttacggacccgtatacgaaagaaaaatacttcgaatattcccatgacggcaaactgatgggacggctgctgataccgtcaaaccctgataaccgggaataaaaacaacgagaaaggagacataaatgaaaatacgttcactaagccggtttgtactggcaagtacaatgttcgccagctttacagcctctgcggtccccggactctggcaacaggggtacggtcagggcaatgcggaatacagtgtgacggatgccagcggaaagatgtttaccatcaactgcacgggaaatccggaccagaacggtatttaccagcactcggtttttctgatcctcgccggggataaaacggtcagctcgcatgatgacagtaccggcatcacagtggtgatggaccataagcaatatgccattccctcaacccttggctggcgtaacggagataatgcctggttcagcttcatcatggatatccgtaaggcccggcagttcgacgtctacgtcaatgaccagaaagttggatcgtttaaccctgatgttcggaatgcacaaaaggtcctgccaacattagcggactgcactaacgactgacggctgcgccttccctaccataacaaccctgattgcctccggcggtcgggggtttcttttttctccttaatctccagaggtaggccacgtactttcgaacgatgagcgcagtggtcagtttttttcagatatatttatctttttttggctgtaagctccgctgtgagcgcaggctgtgttaaaactcctgatcactttttggtctaagcgatggtttcatatgatcaaccattcttgataaacccatgagacggactaactttttcattaaaattaaaaagatatgaatgaatactgcggatatcaacatggccaatcacattcaaggacaaggcaggcatcaggtgacattgctccctgatgcactcgatgattttgtcactgaagatatctgaaataagtttaatcagttcatcacgggtcggtggcatatcgagataattaattattgtcggttcgttgccgttgttatgaagcatctccagcgtgttgcgtgaggtgccacaggccgggttgtgatagatggtaatgttgctcatatcagtatctaattacaaagtgacagagagccgccacgccagcgcggccagagtgacaaacagcaccggcacagtcatgacaatgccggtacggaagtaatatccccaagtgattgtcatatttttctgggcaagcacatgcagccacagcagagttgccagactgccaatcggggtgattttcgggcctaaatcacagccaatcacattggcataaatcattgcctctttgacgacgccagtcgccgtactcccgtcaatcgacagcgcaccaatcagcaccgtcggcatattgttcatcactgatgagagaaatgccgtcaagaagccggtgccgaacgtcgctgcccataaccccttgtctgccagcagattcagcacgccagacaggtactccgtgaaccctgcattgcgcaggccatagaccacgatgtacatgcccagtgagaaaataacgatctgccatggcgcaccgcgcaggacttttccggtgttgatcgaatgacctcttttcgccaccacaaacagcactgctgcgccagcggccgctatcgcactgaccaggattccctgcggctccagaaagaagaaaccgacaagcagcaataacaggacaatccagcccgccctgaaggttgccagatccttgatcgcactggcaggcgtcttcagcagcgaaacttaatacgttgccggaataactctgcgaaagaagagatacagcataatcagcgtggccgcaatcgctgccgcatccacggagatcataacggaggcgtactgcgcaaagctcagaccgaagaagtccgccgagacgatattcaccaggttagaaacaatgagcggcaggctggccgtatctgcaataaatcctgcagccatgacaaaggccagtgtcgtgccctggctgaacccagtgcgatcagcatcgcaatcacaatcggcgtcaggatcagcgcggcgccgtcattggcaaacaacgcatcaacagcggcaccgagcaagactttccaggtgaacagcgctctaggtaggaactttgtcgttgatagagtcttcagccatcaacactgtatcgagtaatgaaattggttgctagaaagtcgatgatttgttgcgtatgattaaaaatcaaccttaaaggctttatacatggatttgctatggcttttgtatcagaaagagaaattgtaagaaagatatttagcaaaaaaattgactttacgatcttggcatttttctatatttcctctattttttttcttctttgtagtggcgttctctttcaatattttaccgctgccttcacaaaaggtaattgttatgaatgctcaatgaaacttgattacataaaacaattttatttttcactggaaaccgcatggtacctcatatctgctgttgcagtatttattgcatctgtttttatacagcatagaattaaagcttatttaacattattagctattacatggattgtactaacaataacagatgtggcgttaatacacgccttagacaatatagccatgaataatattttgttaaatatactatataatctttttggggcgattttattgtcactgtttatgtgtttatcaaattccctccttttccaccttaataagataaaacatattccaatgattttatcggcaatgattccattagtttccgcaataataatagccatactcataaccgctgttatatatttattgtttgcccggcaggcggtagagattgagatggatatatctgaaggttcagacatcgcatatgtaggtgtaaaagataatgaggaatcatttgggtttttaaatgataaaaaaacagacacaccaacgtatctggatgtaatcaaaaatggtagtttgatatataatgatacacagggtttaagtggtgctgatatttatattgtctccggttgttatgcccttccagatttacttcgcaatgtaccgcttgatgctaaaaaatcttttctgaatgtaaaaaagctagaaatcacacagaaacttccaatgatggggttcatacaaggtgaatccgctgatgtgatgcctaaagcagcatccaggttaagtttgagcaagcaagatgataaatttatgctagcctcaagtgttactgactctcaaataaaatttaaatcaaacaatgcacaattgatggttgctttcgcatttatgccaataacaacgaatggtattttacatgattatacatacgatataataataaatgataaaaaatataaaattgaaaatcatgttgcacctctatctaggcttgataaaaataagaagatgaagtgtgaataccagcaaatatcggatttaacaaatacgtataacattaatgcaaattacttaacgggttttttacttgtcctaaaaccagatgatattattaattacaacaatagcccttccgtactactcaagactgattttgcgttctataaaaaaacataccagaagcttgataaaatatatgatgacataagcaatggaaaattatcttcactgagagcaacaggtatctcccagtttagtatcaacgggaaacatttgtcgttaaggccagaatcggagattattatttctgaagggagtttgtatggactagttaataaaagcaaaaaaatcaaaatatatggcacagcagatcttgtttttgttgataacaagataatgaaccttcgtaaaataacttatttgcaatctaagctagaaatttttggttcttctattatggatatattaaagtatatatttggtttaggtctgctagcaatttctataaaattcattcattcttactttaagaatgatgtgaatgaaaatttattcttgtaacgcatttggctccaattggagcctttttatgactatttattaaaatatcctaagttaagcctgtttttaaagcaggcttgagcgtgaagcggacactcatacctgctttaaagtggcgtttttgtcgttacccatacctatattttctgttgtttaactgccagaactgagcggttgaaaagccagaaatatgccgagccagcggcatggaagcgccagcagctgttgaatggagtactgtaggcaaatggtgccgtaaccggctttcgtactgaaaggttctgtctatcccatcccttctcttgtatctaacatttagttgtgaatagctactgtaaatgcccctacaaaatgaaccattatttttagagggcgtctggcactccaacttccgcttttggcacagaacggcctatcagcaatataaaagcattcagatatatatcatttctacaaacatacccgattaacggcagaatctcaggattctgccgcttttttattatttttcaggggagtagtaatgagcaactctgaaggttggtagtcattttagcaaacgctttctggtctgccgcagtgggcatcggctgattgcgtagcagggccactggtatctgccggtatcaccgacattaacattgaagacgaccagggcattcacgtccgcctgatagttcgtgatgccgaaggtcggatggttggcgggcatggaactttgaaccggacgccggtgaaggttttaaccgctatatccacaggtcaggcatccgcaccgacaccttcccccgctgactccgaatcatttaccagcaacatttcaccttcccaaacgcgctttattacctcatacgccagccatcgccgctggcgttttttattcacggagacatacccatgacaacacagacacagtacgacctcgtacccgctaacggatccgaatttgagttgagcgtaacgcaggtacccgatgaacagcatatccgcttctggccgcagcactttggcaccatcccgcagtggataacgctggaaccgcgcattttcgcctggatggaccgcttctgtgatgagtactgcgggggtatctggtccttttacacgctcagcaatggcggagcgtttatggctcctgatgctgacggtgacgataaatggcatttgctcaacggcatgaatggcaatggtgcggaaatgagcgcggaagccgcaggtatcgctgtctgcctgattgaatatagccatcacgcctgcctcaccgaatgcgatgccatgacggagcactattaccgcctgcgggattacgctctgcagcaccctgaatccagcgccattatgcgcattattgattaaggatactcatgatggaacagtcactcatcccacagacaccggtacttccactgaccgcacaacgcacggtaaaacgcgccttaacgctgcttgaccgacacctgcgcgaaacaggcgtggcattcacctccactcaggctgctcgtgactggctgaagctgaaaatggcggggctggagcgtgaagaatttatgatgctgtatctgaaccagcagaaccagttgattgcccacgaaaccctgtttgccggttctattagcagtaccgaggtacatccccgtgaggtggtcaaacgcgccctgtatttcaatgcagcagcagtgatactggcgcataaccacccctccggcgacactactcccagccaggcagataagactataacgcagcgtctggtgcaggcgcttcagctcgttgatatccgtgtccctgaccatctgattgttggtggcaggcaaatctattcgttcgcagaacacggtctgctttgaggtattacatgagaattatcagtaaacgccgggcaatgacgatataccgccagcatcctgagtcccgaatctttcgctactgcaccggaaaatatcagtggcacggtagcgtctgtcattacaccggcagggatgttccggatatcacaggagtcctggctgtgtacgccgaacgccgcaggaccgcagcggaccgtatgcttgactgatgagtatcaccctgaactgacaataaagaggttatgaatgagcaacaccacatggggcctgcagcgagatatcacgccgcgcctgggagcacgtctggtgcaggagggcaaccagctgcactatctggctgaccgggccagtatcaccggtaagtttagtgacgccgaatgtcctaagctggatgtggtatttccacattttatcagccagatagagtcgatgctgaccactggtgaactgaatccccgccatgcccaatgcgtcaccctgtaccacaacggttttacctgcgaagccgatactcttggtagttgcggctacgtatacatcgctgtttaccccactcaacgctaactaatttcacgagagcaagcatgaacactctacctgctacaatttcgcaggcggcgaagccctgcctgtcgccagtggctgtctggcaaatgctactgacacgcctgctggaacaacactatggcctgacactgaacgacacgccgttcagtgatgaaactgttattaaggaacatatcgatgctggtatcactctggccgatgcagtcaattttctggtggaaaagtacgaactggtacgtatcgatcacagaggattttcgtggcaacaacagtctccatatatttccgtagtagatattctgcgagcaaggcgctctaccggcttgctaaaaactaatgtgaaataaacgcttaaatacagagcagactgaaggaaagcaaaatgctaatctcatagacgaagagactcccgctgtaacctcccctcccccgaaaaaacctgacattttcttttaggaccaacaatgggaccaaaatgaaaattgaactgaagattacaatcaatttaacaacaagttacacaaccaattcagactccgccagcccaccaatcatgattggacggtgtaaggacaacaccaacaaaaacaggaagttagaagtctcagcaaaacaccgaccagacggtgaggagacataaaaggatacgcaaaggagccgcggctcctggtaacatgaaagcccacagatgtgggctttttcgttgatggtcagaacgaccagttcacaccagctaccgcgttccacggggattccacaccggcactatggctataccccaccccaagatgcccgcttaacgtactgctgaatgaggctttaatacctgcctggtatattccacgtctgcccgacaaataattgacgaaattaccgtcactattcactttcacccggttatcatcgacaaattctttgcgcacagccgccttcagccacggctcaacttccataccgttccccagacgcatgttgtaactcagcgttgcgcccagttcacgatatatactgcgggtatcgactgatttcgatttcatgccattggataaatgatattcggggttatcagcggtgaaccccgttaacgatgcatacggcgtcaggttccagttaccatcggtaaatcgcatcccggtttcaatgtgaccgcccagcccgttgctgtggtaactgccattggcggctccaccgctgctcattttacctgctacgttacttttaaaacggttcagcttcacgacaccgtccagatagaaaccactttcatgttcccaactggcatagccgcccagagaataactgcccacactgccatgtcctccgcgatcaaaaccgatatgtgaatgggaatagcccataaaagcgcctagcgtggtaattccttcaggaatatcattacggctgtcgatccccactgtcattccggtcagcgtctgctcaaacccggcacccgcatcggtggtgacattattacgggtgttatacgtcgccccccagacattattgttgtgtggactcgctttcattatgttcaaccgctcgcgaatactgtttagctcagcatcaaataccaacggtaatgttgctgccatattgagtacggctgccgtagaaggcgtaatgcgtttctccggaacgggtgtcggcgttggatcgggagtagggtctggttttggatttgggtctggctttggatcgggttttgggtctggctttggatttgggatggggtccgggttgggtttgacatcattggtcaggttccagttgctgttgccgtcacttttcaggacatactcataggtcccaagatcaacgaaaccgccggtattgcccagcgtaaacgaagcatcccctccccctgttttcaccagcgtcatcgcgtcgtcagactgtgggctgacgccggtatcctgaacaaagattttaaaattaccagtggcgttgttgttgacgaccagttgatcgccccgggagcctgcaacgttggtatgcaggtagaaattaccgctaccggaaagttcattggttgtcagcgtattgtagataccgttagttgtggcaggcgctgctgtttgtgctgacaaataaacatcaccgtcgttgagtagcaaactgtttactctatattcgcagttgctggtacctgcacaggaattattgctgttaagccagacactgccccggctggcagccgtcaggtcggcaagcgtggtatcgacgccatttcccagagtcaatgtcgcgctatcggtaatccggaccgccccttcgagtttaactggcgtaacattatcccgtggcgtcattaacgacaggcttcctgtcgcgccactgaccgatgcatccgccagcgtacctgcgtagacgattgccgtaccgccagcgacctggagatcttctgcccgggccagagcctgaaactcatcttttgaccgcccaagggtatattgcccgccagagttaacctttgtggcggagtcctgacccaggttttgcattgccccacccttgccaaccgtggagtcgcgagcttcggtacctgctaataccaataaattaccgccattttccagcaacatattggtcgctaaattgccggaaatggaaaaagtaccgtactggtgagtaccgctgatttcaataccgttagccgtgctcgtctggagagcggcaccgctgttctggacgatatctgtcgctttgccattatcgttgactgtcagcgtaccgccttcattgatctttgtttttattgcctctccgttagctgaaactgtttgtattccgccgtcgttaattgttgtctcattcgccacaccctcgacaatttgttcaccgccggtgagcgtcgtgcctgtcgcagtggcttttgttttgacgatctcccgtccgcccatattgacctgtgttttgtcagaagaggtgtctgactccacggttaacacgccgccatttgccagcaggatattgttcgccgcaccctgctcgatgctgaacgcgacgccatccgcgcgtgttcctgtgacccgcgtcgccctggtggttgcaaccaaagcgccctggctactctgctgtatccccgttgcgctgcctttctcccgcacatcgagtgtgccgccgtcattaagcaccgagttttcagccaggccgccctcattaactacctgtgaacccccattaataatggaaccttccgctgtcccgtttgccataatttgttgtaggccagagacgatatcggtattgattgccttaccataattctgaacggtttgcgtgccaccattgatgtgtgttttctctgttgacccaccatcaacaatttgttcaccactttcgatatttgcttcagtggctaaaccatataccgtttgcttgccacctttgatatttgctttatcagaagtggcactggcatatattgtttgggtgccagcactattgagtacagtgccaacatcttttccataaacatccattttgccgttggcattaataatcgtgtcaactgcgcgggaaccagtgacgactgttaatgagccagcgttttccagcactacatttttagcttctgaattcctgatgtagaaagcatcaccataactgttggttccttcgataagtgttccggaggtcgtggaagcaattaatgcgccgccggattgttgctcaacatgcttagcctcaccaccgtcctgaacctccagaacgccgccattattaagtctggtgctatctgttttagcctccttctggacaatcagcttaccgccagtatcaatggtagtatttttcgccgaggttttagccactaccgtcagttcgccggtattttccagcacaacataattagcctcccctccggtaatagtgaagtgagagagcttgttgtatccttcgatatcagtccctgcacccgtgttggcaactaaagcactgcccgtctcctggttaaccccatgtgcaataccgccggtatagacaatcagcgagcctccggcgctaatattgctgccaattgccgtaccatctttctcaacaacctgccggctcccggaggatataattgttgtgtcagctttcccgccgcttttgatattttgcgttccgctgttgatattggtgcctgtggctatgccataattattaatattctgtgtgccaccattaattatggtatttgtcgcgtttcctgcaacatccataaccccgccattatctattcgggtcgcatcagctttagcattggttaaaactgacattgttcctttatctttaataatcgtcttgtttgccgaaccatatgcgtttatgtctaaatgaccaccgttttccagcaacacattgtctgccacgtgattgtggatggagaatgcaccttcactattcgtaccgctcaccgtcgtaccgttagtgttagtttttaaaattgcaccatcgtgctgggtaacatttgttgccgtaccacccctaacatcaagcacgccaccagaataaacttcaataacatccgaggtgctggtgttatcaacaatttgcgtgccaccagaatagatatgcgtattttttgccgttgacttactattcagagactgagttccgccttcaatcgtcgtgtccagcgcacggctctcatatactctttgctcaccgccatttttaatggttgttgtttctactgtgctctgttcaacatactgtcgaccaccatttatggttgtgttcgttgccagacttccttgtactacgtcctgagagccagacttatttatcgttgtaccatcagcatgcccttgaacttttactatctggctaccaccatcaatgagtattccattcgcactccctccctctacgcgtgaagcaccgcccttaattgtcgttccattgctgataccccctttataaacgtcctgattgccactctcgattgtcgtacctgtggaaatacccccgtcatgaattgactgtctgccaccgttaatggttgtattattagcctgccccacaaaattgttatgacttcctatatcttgatatccaccagattcaataagacttccattagataccccgccatgaacattctgctggccatggttgataatatgagtgttatttgttgtacctcgttcatccactttttggttgccatctacagtctcatcgtttaccacaccaataacattagtagtgaaggcagccatcccgggcggggcatatatcaaggcagatatcaataaggaaagtactgagcggcgacaataatagggactggtcctgttcataaatttcatcctctgaaaagtgaatactgagtagcgtttaagcgaccttagctttgctgcaacatcagcccacaggcaccagaccaggggattcatcctgaagagacagcgcaagtgtattgtgttcaccgctcatcaaagacatcatgatgaaatgatgatattccgcataagaatgaggcattttttaaacgcagtgcgctgaagtgtggttggataaaaaagtcaatccattcaggaaatacgggcgtattcttttctttcgacaatgaggccgttggcaaaataaaatgatttacataatcgtttctgatgaatatcttctgctcacataaaaatcacacaataactttgagatcgcagattgttttacttttacagcattcgtccccccattgttgggcaaatatagattgggccagagcacgaaagttaataccacgttcgcacagctcctccaacagcacgacaagatgccacatactgcgccccagtcggttcagtttacagactagcagtgcgttccctgccgatgatgtcctgaccagttttttcagtccggacctcctgccacggttttacgttgaagtggtaaccctgagcacgcagttcttcagtcaggcgtggtgcaccgtaacgctgttattgctgggtaagatcaaaaaactttcaggcagctaaggaaagttgaaccagacattagatgaaatatttcaaccaattacagcaccaattcagtcactgccagcccaccaaataaatcaaggggttacatgaaaacgtagcccctttttctttggtagtgacactaaaatggatgtagtgtgaagaataatcccgtttactcaatcaataatacatattgtttcaatctacgttattatctctttgtaaaaattgccatttattaatcattgaaaactgcttttagaacttgatacaacgggactagtcacaacaggactattctcaacgggatcatcctcagaggaactatcatcaaagtcatcatccataaataaaatatcatcgaatggtgccacgcccgtgatgagttttattttattattacgatcagtcaatactccacttaaaccgttttcgctcacaggttttaatgatttttcattactcttgttgtaagcaggcgcattaaaaatacacggagtatcaacatcaaacaatgacgttccccagttcacatattgaatatcatagttactgaagttctgtccagaaaagaagcaccccttaaaatccaatccacgtaaattatataaaccaccctcttctttttggagagtaatgttaattttggctatctcccggacatcatcgccatttttgtatttgaataccgtttcaagatgttctccagacagcttgacttcaggaaataatttgaaatcaaagcctatattattatgtgtcaacgtagatgaacaaaaaatggaaaaagcttgcagtgctgaattatagctatcgattttatcttgaggctgagctcttggtaaaaacttatagcaacactcataaaaattaaacagaagctctgaagaccttgtatttttatcaaataatacccccttgaactcattcacaaacgcatcttttttttcttgaatatctatggggtgttcctttgactctgacaaagatgaaatctcatctattttgttttcatatgaattacgtgattccatacagacatttggcggcgtttctaaaataacactacgcgtactacttggcttaagtaaaccaacatgaaaatcactttttcttatattatcgaaaaggttctattcatttcttttagcgcattcaaaaaactgatcggcattatttttattcgataattttttagtttcagaaaacacattttcattgttttccagctttagtttaatgagaagattttcccagacctgcttgcttaaacatattacgtcaggctcaccagaactaactaactcgtgattattattaaagtgtacgttgaatacctttaagttattttcaccaacttcatatttaatacgttttaattgttctccagctcccataatgacaaaggcgttgccttcttgatatatacattcagacatcattttttgtaaagtttcaagagcaccgcgatacgtctctgatgcagcttccttacaaattaattttaaaatactatgagctagtagctccatgtgtttagaagatttattttcattataacttccactacccaaaactgcgctagcgttaaatccgttgcttttactaactaacattgtctattcctcaattaatgtctacatggctatttttaatgttattactgtttgtcactataaaaaaacgctcatttgagacaattactgacattaactgcttcacttgctacgcatggaacttttaattaaattagcacaggaatgttaaatttaataaacaaaaggttatttcgctgtatgataaaaaaaaccgttataatttattagtgaaaatcgtttttcaagtgttagaaatttatatctcaatagcgttggttaatgagcatagccacgctcctgtaacgctcacaaaactcatctgcctgcggcgggtgttctggtcagtagtagatgtttaaggcgtggcagagacatttcatccttactctacggcattgttctacatacattggttgtggtactcacttatcatcagtgagcgaacagagaatagttcagtgatttgagtaattaacctgattaaatgaaggggtataataaatgataatactctggctttatcgttaattacttaattccacatgtaagcaatttgcccgcttggcatagcaggcattttttccaggtacttttgaatgagtactgatggataaatacattgcagtggcgtgccacgtaccaaaacaccagccctcattcgaaaccacccaccgcacttcttccttgaaatggcgttagtcatgaaatatagaccgccatcgagtaccccttgtacccttaactcttcctgatacgtaaataatgatttggtggcccttgctggacttgaaccagcgaccaagcgattatgagtcgcctgctctaaccactgagctaaagggccttgagtgtgcaataacaatacttataaaccacgcaataaacatgatgatcatatgatgtaaataacagatttttatgcgttcccattcaccttgggtcgtgattacacgcgacataaaacccgacaccgcctccattcgcaaagtcgatactcgcagtcaacaagcaaatgttaataattagcactatctatagttatcatcgattcaatgatactttgtaatgattttgtatctaataatataactttattacattagctgaagagttttcgcatcattatgatatctgttacttttcactccataaaaataaacttcgtatagcaatatattctttcatagatcttattctgctaatcattagtttcgtatgagcgatttttgacagttgcctctccagaccacatcgataattaataaaacagatttaagcattatccttttccatataaatattggataaaagtaggacatctgtttgcaattactttcacaacaattaaacatttttatgtttccgtatacatcatattactctaccattagaggaactttattatgttttctataaaaccaggacccagaaatttacctatcgacaaccccacattgttatcatggaacattactgacggggatctaaattccaaattaaatacattagaatatctaaactgtataacaaatattattaattcttgtggagtttaccctcaaggattaaaagacagagaaattatatcaacttttcacgcagaaaaagttattaatgatctgttaaaaaacgattataaaatttccctttctccagatacaacttaccgagagttgaataaagcagcacagcgtagcattacagcgccagacaggataggagaaagaaaaacataggtttatcaacgagatacaatgattgaaagaggtgataacagcggtgtttatcagtatggtcgtgctgaacatttcacccacattatatctgacaaaccttccccaaaagataaatatgttgcatatgctattaacattcctgactatgagctggcagccgatgtatataatattaacgtgacgtcaccttccggacagcaagaaacatttaaaatattaatcaatctagaacatctacggcaaacacttgaacgtaaatctcttactgctgttcagaaatcacaatgtgaaatcatcacccccaaaaaacctggcgaagcgattcttcatgcttttaatgccacctaccagcagatcagagaaaatatgtctgaatttgcacgttgccattatgggtatatacaaatccctccagtgacaactttccgcgccgacggaccagaaactcccgaagaagaaaagggttactggtttcatgcttatcaacccgaagatctttgtaccatccataatccaatgggagatttgcaggattttattgcattggttaaagatgctaaaaaatttggtatcgatatcattcctgattatacctttaactttatgggaattgggggtagtggtaaaaatgacctggattatccctctgctgatatacgagcgaagatcagtaaagatatagaaggtggtatccctggctattagcaaggtcaggttttgattccattcattaaagatccagtaacaaaagaacgtaaacaaatccatccagaagatatacatctcactgcaaaagacttcgaagcaagtaaagataacatctctaaggatgaatgggaaaacctccatgcattaaaagaaaagcgtttaaatggaatgcctaaaacaacacccaaaagtgaccaggttattatgttgcaaaatcaatacgttcgtgaaatgcgaaaatatggcgtacgaggtttacgttatgatgcggcaaaacactcaaaacatgaacaaatagaaagatcaataaccccaccgcttaaaaattataatgagcggttacacaatactaacttatttaacccaaaatatcataaaaaagccgttatgaattacatggaatatctggtaacttgtcagttggatgaacaacaaatgtcatcactgctttatgaaagagatgatttaagcgccattgatttttcattgctcatgaaaacgataaaagccttttcatttggtggagatcttcaaacccttgcatcaaaaccgggttccacaatctcaagtatcccatcagaaagacggatattgattaacattaaccacgattttcctaacaatggtaatcttttcaatgactttctatttaaccatcaacaagatgaacaattagcaatggcatatatagccgctctgccgttcagcaggcctttagtttactgggatggccaagtattaaaatcaacgactgaaattaaaaattatgatgggtccacgcgtgtcggcggtgaggcgtagcttaataaaggttgctctacctatcagcagctctacaatgaattccacgcattatatatagataaagcaggaatatggagcgcatttgagggtgtatctgcaactaaaaacgttctggcctttagtcgtggggattctgtgaacattaatcactctcctcatgatggactagttataataaataaaggaaacgaagaagttgaaggtacctggcctaacaaattgcaacctggaatatacaaaaacatggggagtaatagcgttaacattattattaataatacccgaaaaattatcccccctggtaaagtatttacgcttagaggcggaactctaaatatcaatattcctgggcgtagcgctcttcttttagggaaaacaggagaaccgccgaactatctctatttataatttaatgttatatctgccccgataaaacggggcagataatatgtttagtttactaacggtcattttgcagtgaagccatttactgttttttatcgaccagataatctgttctctaatgttaactccccctaacctgttgctttagttattcatttcctgtctcactttgccttaataccctacgttaaatgttactaatttgttgcttttgatcacaataagaaaacaatatgtcgcttttgtgcgcatttttcagaaatgtagatatttttagattatggctacgaaatgagcatcgccatgtcaccctacatctcataagaggatcgcttctgatgaatgcactgaccgccgtacaaaataacgctgtcgattcaggccaggactatagcggattcaccctcaccccgtcggcgcaatccccgcgtctgctggaactcaccttcaccgaacagacgaccaaacagtttcttgagcaggttgccgagtggcccgtgcaggcgctggagtacaaatcgtttctgcgttttcgggtagccaaaattcttgacgatctatgtgcgaaccagctgcaaccattgctgttgaagacgttgctaaaccgcgctgaaggtgcgttgttgatcaatgcggtgggtgtcgatgatgtgaagcaagcggatgagatggtgaagctggcgacggcggtggcgcatctgattggccgttccaatttcgatgcgatgagcggtcagtattacgcgcgttttgtagtgaaaaatgtcgataactcagacagctatctgcgccagccgcaccgcgtgatggagctacacaacgacggcacgtatgtcgaagagataaccgattacgtgctgatgatgaaaatcgacgagcaaaacatgcagggcggaaattcgctgctgctgcatctcgatgactgggaacatctcgacaactatttccgccacccgctggcgcgtcgcccgatgcgctttgccgcgccgccgagtaaaaacgtcagcaaagatgtttttcatccggtgttcgacgtcgatcaacagggtcgcccggtgatgcgctatatcgaccagttcgtccagccgaaagacttcgaagaaggcgtgtggttgagcgagctttccgacgccattgaaaccagcaaaggcattctttctgtgcccgttcccgttggcaaattcctgttgattaacaacctgttctggctgcacggtcgcgaccgctttactccgcacccggatctgcgccgtgaactgatgcgccagcgtggctatttcgcttacgcctctaaccactaccagacgcatcagtaagcgcaaaggaattgagcggatgtatgattttgtgattattggcggcggcatcatcggcatgtcgaccgccatgcaactgattgatgtctatccggacgcccgcattgcgttgctggaaaaagagtccgccccggcctgtcaccagacgggccacaacagcggcgtgatccatgccggggtctattacacgcccggcagcctgaaggcgcagttttgcctggcgggaaaccgcgccaccaaagccttttgcgatcaaaacggcattcgctacgacaactgcggcaagatgctggttgccacgtccgatctcgaaatggaacggatgcgcgccttatgggaacgcacagcggcgaacggtatcgagcgcgaatggcttaacgccgacgaactgcgcgagcgcgaaccgaatatcaccgggctcggcggcatttttgtgccgtccagcggcattgtcagctaccgcgacgtgacggcggcgatggcaaaaatcttccagtccagaggcggtgaaattatctataacgccgaagtcagcgggcttaatgagcataaaaacggcgtggtgatacgtacccgtcagggcggcgaatatgaagcatcaacgctgattagctgttccgggctgatggctgaccggctggtgaaaatgctcggactcgaaccgggctttatcatctgcccgttccgtggcgagtatttccgccttgcgccggagcataaccagattgttaaccacctgatttaccccattcccgacccggcaatgccgtttttgggcgttcatctcacccgcatgatcgacggcagcgtgaccgtcgggccaaacgcggtgctggctttcaaacgcgaaggctatcgcaagcgcgacttctcatttagcgacacgctggagattttgggctcgtcggggattcgccgggtgctgcaaaaccatctacgctcaggactgggcgagatgaaaaactcgctgtgcaaaagcggctatctgcggctggtgcaaaagtattgtccccggctttcgttaagcgatctccagccctggcccgccggtgtgcgggcgcaggcggtatcgccggacggcaagctgattgacgattttctgtttgtcaccaccccgcgcacgatccacacctgcaatgcgccctccccggcagcgacatcagcaattcctattggtgcgcatattgtcagcaaggtacaaacgctgttggcaagccagagtaaccccggacgcacgctgcgagcggcacgtagtgtggatgccttacacgccgcatttaatcaataacctttgaaaacaggatgtagcgatgaaacttaacgacagtaacttattccgccagcaggcgttgattaacggggaatggctggacgccaacaatggtgaagccatcgacgtcaccaatccggcgaacggcgacaagctgggtagcgtgccgaaaatgggcgcggatgaaacccgcgccgctatcgacgccgccaaccgcgccctgcccgcctggcgcgcgctcaccgccaaagaacgcgccaccattctgcgcaactggttcaatttgatgatggagcatcaggacgatttagcgcgcctgatgaccctcgaacagggtaaaccactggccgaagcgaaaggcgaaatcagctacgccgcctcctttattgagtggtttgccgaagaaggcaaacgcatttatggcgacaccattcctggtcatcaggccgataaacgcctgattgttatcaagcagccgattggcgtcaccgcggctatcacgccgtggaacttcccggcggcgatgattacccgcaaagccggtccggcgctggcagcaggctgcaccatggtgctgaagcccgccagtcagacgccgttctctgcgctggcgctggcggagctggcgatccgcgcgggcgttccggctggggtatttaacgtggtcaccggttcggcgggcgcggtcggtaacgaactgaccagtaacccgctggtgcgcaaactgtcgtttaccggttcgaccgaaattggccgccagttaatggaacagtgcgcgaaagacatcaagaaagtgtcgctggagctgggcggtaacgcgccgtttatcgtctttgacgatgccgacctcgacaaagccgtggaaggcgcgctggcctcgaaattccgcaacgccgggcaaacctgcgtctgcgccaaccgcctgtatgtgcaggacggcgtgtatgaccgttttgccgaaaaattgcagcaggcagtgagcaaactgcacatcggcgacgggctggataacggcgtcaccatcgggccgctgatcgatgaaaaagcggtagcaaaagtggaagagcatattgccgatgcgctggagaaaggcgcgcgcgtggtttgcggcggtaaagcgcacgaacgcggcggcaacttcttccagccgaccattctggtggacgttccggccaacgccaaagtgtcgaaagaagagacgttcggccccctcgccccgctgttccgctttaaagatgaagctgatgtgattgcgcaagccaatgacaccgagtttggccttgccgcctatttctacgcccgtgatttaagccgcgtcttccgcgtgggcgaagcgctggagtacggcatcgtcggcatcaataccggcattatttccaatgaagtggccccgttcggcggcatcaaagcctcgggtctgggtcgtgaaggttcgaagtatggcatcgaagattacttagaaatcaaatatatgtgcatcggtctttaactggagaatgcgaatgaacagcaataaagagttaatgcagcgccgcagtcaggcgattccccgtggcgttgggcaaattcacccgattttcgctgaccgcgcggaaaactgccgggtgtgggacgttgaaggccgtgagtatcttgatttcgcgggcgggattgcggtgctcaataccgggcacctgcatccgaaggtggtggccgcggtggaagcgcagttgaaaaaactgtcgcacacctgcttccaggtgctggcttacgagccgtatctggagctgtgcgagattatgaatcagaaggtgccgggcgatttcgccaagaaaacgctgctggttacgaccggttccgaagcggtggaaaacgcggtaaaaatcgcccgcgccgccaccaaacgtagcggcaccatcgcttttagcggcgcgtatcacgggcgcacgcattacacgctggcgctgaccggcaaggtgaatccgtactctgcgggcatggggctgatgccgggtcatgtttatcgcgcgctttatccttgcccgctgcacggcataagcgaggatgacgctatcgccagcatccaccggatcttcaaaaatgatgccgcgccggaagatatcgccgccatcgtgattgagccggttcagggcgaaggcggtttctacgcctcgtcgccagcctttatgcagcgtttacgcgctctgtgtgacgagcacgggatcatgctgattgccgatgaagtgcagagcggcgcggggcgtaccggcacgctgtttgcgatggagcagatgggcgttgcgccggatcttaccacctttgcgaaatcgatcgcgggcggcttcccgctggcgggcgtcaccgggcgcgcggaagtaatggatgccgtcgctccaggcggtctgggcggcacctatgcgggtaacccgattgcctgcgtggctgcgctggaagtgttgaaggtgtttgagcaggaaaatctgctgcaaaaagccaacgatctggggcagaagttgaaagacggattgctggcgatagccgaaaaacacccggagatcggcgacgtacgcgggctgggggcgatgatcgccattgagctgtttgaagacggcgatcacaacaagccggacgccaaactcaccgccgagatcgtggctcgcgcccgcgataaaggcctgattcttctctcctgcggcccgtattacaacgtgctgcgcatccttgtaccgctcaccattgaagacgctcagatccgtcagggtctggagatcatcagccagtgttttgatgaggcgaagcagtagcgccgctcctatgccggaggcgacgctgcgcgtcttgtccggcctacggggatccaggtcggataaggcgtttacgccgcatccgacaatctgtacgtgaacaggaagaaatctatgttggccgggtaaggcggagccgctctccggcaaaaagaatcaataacaattatacgcgtgacccggcgcgggaaatgtcggggcgctctcccaagtgacacactttcgagaggattcaggatggggcaatcatcgcaaccacatgagttaggcggcgggctgaagtcacgccacgtcaccatgttgtctattgccggtgttatcggcgcaagtctgtttgtcggttccagcgtcgccatcgccgaagcgggcccggcggtattactggcctatctgttcgccgggctactggtggttatgattatgcggatgttggcggaaatggcggttgccacgcccgataccggttcgttttccacctatgccgataaagccattggtcgctgggcgggctataccatcggctggttgtactggtggttttgggtactggttatcccgctggaagccaacatcgccgccatgatcctgcactcatgggttccaggcattcccatctggttattttccctcgtcattaccctcgccttaactggcagtaacttattaagcgttaaaaactacggcgaatttgagttctggctggcgctgtgcaaagtcatcgctatcctggcctttattttccttggtgcagtcgcaattagcggtttttacccgtatgccgaagtgagcgggatctcaagattgtgggatagcggcggctttatgcccaacggtttcggtgcggtattaagcgcgatgttgatcaccatgttctcgtttatgggcgcagaaattgtcaccattgccgccgcggaatccgacacgccggaaaaacatattgtccgcgccaccaactcggttatctggcgtatttctatcttctatttatgttctatttttgtcgtcgtggcattaattccgtggaatatgcccggactaaaagccgtcggttcttatcgctcggtactggaattgctcaatattccccatgcgaaattaatcatggactgcgtgatattactttccgtaaccagttgcctgaactcggcgctgtataccgcgtcaaggatgctctactccttaagtcgtcgcggtgatgctcccgcggtaatgggtaaaatcaaccgcagtaaaaccccgtacgtggcggtgttactctccaccggcgcggcattcttaacggtggtggtgaactattacgcgcctgcgaaggtatttaaatttctgatcgacagctccggcgctatcgccctgctggtttatttagtcatcgccgtttcacagttgcggatgcgcaaaattctgcgagcagaaggaagcgaaattcgcttgcgaatgtggctttatccgtggctcacctggctagtcatcggctttattacctttgtgttggtagtgatgctattccgtccggcgcaacagttagaagtgatctccaccggcttattagcgatagggattatctgtaccgtgccaattatggctcgctggaaaaagctggtattgtggcaaaaaacacccgttcataatacgcgctgatcatgatcaggagtcacaccatgaccattacgtctctggatggctatcgctggctgaagaacgatattattcgcggtaattttcaaccggatgaaaaattacgaatgagtttgctgacatcgcgttatgcacttggcgttgggccgttacgggaagctctttcgcaactggtggcggaacggctggtcacggtggtgaatcaaaaagggtatcgggtggcgtctatgtcagagcaggagctgctcgatattttcgacgcccgcgccaatatggaagcgatgttagtgagtctggcgattgcccgcggtggcgatgagtgggaggcagacgttctcgcaaaagcgcatctgctgagtaagcttgaggcctgtgacgccagcgagaaaatgcttgatgagtgggatctgcgtcatcaggcgtttcatacggcaattgtggcgggctgtggttctcactatttgctgcaaatgcgtgaacggttgtttgatctggcggcgcgttatcgatttatctggctgcggcgaacggtgctttcggtggaaatgctggaggataaacacgatcagcaccagaccctgactgcggcggtactggcgcgagataccgcgcgcgccagtgagttaatgcgccagcatttactgacgccaattcccattatccagcaggcgatggctggcaattaactactcttccggaatacgcaacacttgccccggataaattttatccgggctttttagcatcggtttattcgcttcgaagattttattgtacagattagcgttaccgtagacctgtttggaaatggcactcagagtgtcgccagacttaacggtataaaactggctggcagtggctggtgtcgccgttttcacctgatcatcgacactggcaataccggaaatattccccaccgcaacaaggattttctccttcgcctcctgactcaggccgtcaccagtgaccgtcgctttgccgtcggcaatttgaatattcactttatcggcatccggtataccggttttgttcagatgctcctgcaccttcttcgcctgatcgtctttatcgtgctgacctgtaaccgcgtcccagagtttttctccggcatctttcacaaaattgaacagacccatagctacctcattcgttaacggaaacactcagaaagtgtagcagaggaacgcggcgcgttaacgccgcggggatgagcacaggtttaatcgcgggtttgcacccagaacgcgtgaatcaaaccggggatatacccaagcagtgtcaacagaatattaataatgaacgcccaaccgaaccctttaccgagcagcacgccgagcggcggcagaatgatggtgatgacgattctccagaaacccatatgtactccctataagaaaattactcattgtttaaaaagagattttatctcttaagcgtagtaattttagcggagcctgccagtttcagcttacgcttttactctcatttacgctgctgaggctggtatatgttgcatttttagtttagagtttacttaatttagaaaatacttaaataaatatgactgaactcgcgcaattacaggccagtgccgaacaggcagcggccttattgaaagcaatgagccaccctaaacgattgctgattctgtgcatgcttagcggttcccccggcaccagcgcgggagagctgacgcgcattaccggactgagtgcctctgcgacatcacagcatctcgctcgtatgcgggacgaagggcttatcgacagccaacgggatgcccaacgcattctatattccattaaaaatgaggcggtaaatgccattatcgccaccctgaaaaatgtctattgtccgtaaggagtcactatggctttgacaaccatttcgccgcatgatgcacaagaattaatcgcacgcggcgcaaagttaatcgatattcgtgatgctgatgaatatcttcgtgaacatattcctgaagcagatctggctccattatccgtgctggaacagtcaggtcttccggctaaattacgtcacgagcaaattatattccactgccaggcaggtaaacgcaccagtaataatgccgataaattagcagcgattgccgcccccgcagaaatctttttactcgaagatgggattgatggctggaaaaaagcaggattgccagtagcggtaaataaatctcaacccttgccgttaatgcgccaggtgcagatcgctgcgggtggtttaatattaatcggcgttgtactgggttataccgtaaatagcggtttcttcttattaagtggctttgttggtgccgggttactgtttgcaggaatcagcggtttttgtggaatggcaaggttgttagataagatgccgtggaaccaacgagcttgagaagcgacgccggacgcgccctagcagcgacatccggcctcagtaattagatcaggaaatcgtcgagagatttaccttctgccagcgcctgagcaattggcttcggtgtacggccctgaccggtccaggttttagtttcaccgttaacatcggtgaatttatatttcgccggacgcggctggcgttttttaccagcgcgtggtgcagcagcagagctattacccaataactcttccgggttaattccgtcagctttcatcagctccagccaggtgctaattttttcctggcgctctgccagttcacgctgctgctgttcttcttcttcacgtctttctttagtgacaaccctgaatttttcgagcatttcttcaagaacgtcaatggagaattcgcgagccatcgcacggagggtgcgaatgttatttaaactttgtaacattacggacataataaagaaaaccttttaacgccaaaacaaaaaaagtatttcgtcgcgtagtgtaagcgatcacttattatatttccacaaaatttaatctatttacagtcctgcgcgagattatttcagctgttattttctgaaactctcagaataatttcaagattatatattagccattttgatgagtaatttagattattggtgaacagagcggcgctctctgctcgctaattccgcaagcctgacaaaatcaaagtgaataaaaatgcaatataacagaataaaagaaaacatccatcactggtgctttctgctgttaatgtacattgtctggcataaaaaatgctgaaaatgacccagctactacatacaccgaattctctacgcttatagcgttacctcacccccaaactttcattagtgatattaaaggtaaggccatatctaattgatttaattaaaaataaatcatatcggcatgtaaaaatccacaatgtacaaaaaacgagccgttacggaatattttatctacaaaaactgactaaataaaaatttttcactaattgattagtcatagccagcgatatacgctatgcgaaaatgcagatggcaatgagatccactgctttcatctccattaacatcccattacgcttttattaaggagcattagcatgttctcaccgcagtcacgcttgcgtcatgcagttgcagatacgttcgcgatggttgtttactgttctgtcgtgaacatgtgtattgaagttttcctctccggaatgagcttcgaacagtctttttattccagattggtagcgattccggtgaacatcttaattgcatggccatacggtatgtaccgtgatctgtttatgcgcgcggcacgcaaagttagcccgtcgggctggataaaaaatctggcggatatcctggcttatgtgacgttccagtcaccggtgtatgtggcgatcttgttagtggtgggcgcagactggcatcagattatggcggcggtcagttcaaacatcgttgtttcgatgttgatgggggcggtttatggctacttcctcgattattgccgccgactgtttaaagtcagccgttaccagcaggtaaaagcctgactcttcttttcgcgactggcatcgccagtcgcgtctttaactggcttcgccaaataaaccattcaaataacgttcaagcgcaacacgcgaactaaagccatgcgggataccgtaatgctcgtgtcgctcgcctgctaaatagagcggaaattgctggtaatgatcgcaagttttaatatcggaagcgggttcagccagtgtcgaactgcgttcttttaatgttggatgaattaccagagcggtacgtcccattcgcgcttcgcgattaacatagacataattttccccacggcggtaaccatacgctttctgggttaccacatcgacagtaaaaccgactttttcaagtacgcgcgccacctcgtctggtcgtaaatacatatttgatcctcgttattatcaaccgcgggcctaccttacctgattgcgcattcacaacgctttcagaaaagtccataaagccgcgatgaacctcagttaagaaaattatggtctacactgaaaattacatcgaattctaatgggggatcatatgtttaaccgaccgaaccgcaacgacgttgatgatggcgtgcaggatatccagaatgatgtcaatcaattagctgacagcctcgaatctgtattgaagtcctggggcagcgacgccaaaggggaagctgaagccgcacgcagtaaagctcaggcattgctgaaagaaaccagggcgcgaatgcatggtcgtactcgcgtccagcaagccgcgcgcgatgccgttggctgcgcggattcttttgttcgtgaaagaccctggtgtagcgtgggtacagcagctgcggtaggtatttttatcggcgcactgttaagcatgcgcaaatcgtagtgcaaaaatgataataaatacgcgtctttgaccccgaagcctgtcttcggggtttctttttgcctggtgaatcacaaaaatccccctaccccgtcacgctcatatccagggtaatttcgaccactatttgctatatattgtgtggttgaatcttttttcaactacatctagtatctctgtatcaacagagagacaacccgacgcgtatcatcgcgccgtatcttcattttaaacggaaatacgaatcatgcgcattactatttacactcgtaacgattgcgttcagtgccacgccaccaaacgggcgatggaaaaccggggctttgattttgaaatgattaatgtcgatcgcgttcctgaagcggcagaagcgttgcgtgctcagggctttcgtcagttgccggtagtgattgctggcgatcttagctggtctggtttccgtccggacatgattaaccgtctgcatccagcgccacacgcggccagtgcatgagccagctcgtctacttctccagcagctccgaaaacacgcagcgttttatcgaacgtttaggtctgcccgcggtgcgcatcccgctcaatgagcgggaacggattcaggtagacgagccttacatcctgatcgtgccctcttacggcggcggcggtacggctggcgcggtgccacgacaggtaattcgctttttaaacgacgagcacaaccgggcgttgcttcgcggcgttattgcttctggtaatcgcaactttggtgaggcgtatggccgcgccggagatgtgattgcccggaaatgcggcgtgccgtggctgtaccgttttgaactcatgggtacgcaaagcgatatcgaaaacgttcgtaaaggagtaaccgaattttggcaacgacaaccgcagaatgcctgacgcaggaaacgatggattaccacgcgctgaatgcgatgcttaacctctacgatagcgcaggtcgcattcagttcgataaagaccgccaggccgttgacgcctttattgcgacgcatgtgcgtccgaacagtgtgaccttcagtagccagcagcagcgcctgaactggctggtcaacgaaggttactatgatgaaagcgttcttaatcgctactctcgcgactttgtcattacgctgtttacccacgcacacaccagcggttttcgtttccagacattcctcggggcatggaagttttacaccagctatacgttgaagacattcgacggtaaacgttatctggaagattttgccgatcgagtaacgatggtggcgctgacgctggcacaaggcgatgagacgctggcgttgcaactgaccgatgaaatgctgtcaggacgctttcagccagccacgccaacattcctcaactgcggtaagcagcagcgcggcgaactggtttcctgttttttgctgcgtattgaagacaatatggagtcgattggtcgggcggtaaattccgcactgcagctgtcgaaacgcggcggcggcgtagcatttttgctgtcgaatctgcgagaagcgggcgcgccaattaaacgtattgaaaatcaatcttctggcgtaattccggtgatgaaaatgctggaagacgcattttcctatgccaaccaactcggcgctcgtcagggggctggtgcagtctatttacatgctcatcatcccgatattctgcgttttctcgacacgaaacgggaaaatgccgacgaaaaaatccgcattaaaacactgtcgcttggcgtggtgatcccggatatcactttccatctggcaaaagagaatgcgcagatggcgctgttttcgccttatgacgtagagcgagtttatggcaagccgtttgccgatgtggccatcagccaacactatgacgaactggttgccgatgaacgcattcgcaaaaaatacctcaacgcccgtgatttcttccagcgactggcagaaatccagtttgagtccggctatccctacatcatgtatgaagacacggtaaaccgtgctaaccctatcgccgggcgcataaatatgagtaatctctgctcagaaattttgcaggttaacagcgcctcagagtatgacgagaatctcgactatacccgcacaggccatgatatttcctgcaatttaggttcgttgaatattgcgcacaccatggattcccccgattttgcccgcacggtagagactgccgtgcgcggtttaacggcagtatcagatatgagtcatatccgcagcgtgccgtccatcgaagccggaaatgccgcctcgcacgccatcggactggggcagatgaatttacacggctatctggcgcgagaaggcatcgcttatggttcgccggaagcactggatttcaccaatctctatttctatgccatcacctggcatgcactgcgtacctcgatgttgctggcacgcgaacgcggtgaaaccttcgccgggttcaaacagtcacgctatgccagtggtgaatattttagccaatatctgcaagggaactggcagccgaaaacggcgaaagttggcgaactgtttacccgtagcggtattacgttacctacccgtgagatgtgggcgcagctgcgcgacgacgtgatgcgctacggcatatacaaccagaatcttcaggcggtgccgccaaccggttctatctcttatatcaaccatgctacgtcgagtattcatccgattgtggcgaaagtagagatacgcaaagagggcaaaacaggacgcgtttactaccctgccccgtttatgactaacgagaatctggcgctgtatcaggacgcttacgaaattggcgcagaaaagatcatcgacacctacgcggaagcgactcgccatgtcgatcaggggctgtcgctgacgctttttttccccgataccgccaccactcgcgatatcaacaaagcgcagatttacgcctggcgcaagggtatcaaaacgctctattacatccgcctgcgtcagatggcgctggaaggcactgaaattgaaggctgcgtctcctgtgcactttaaggaatatctatgaaactctcacgtatcagcgccatcaactggaacaagatatctgacgataaagatctggaggtgtggaatcgcctgaccagcaatttctggctaccagaaaaggtgccgctgtcgaacgatattcctgcctggcagacattaactgtcgtagaacaacaactgacgatgcgcgtttttactggcctgacgctgctcgacacgctgcaaaatgttatcggcgcgccttctctgatgcccgatgcactcacgcctcatgaagaagcggtattatcgaatatcagctttatggaagcggttcatgcccgctcttacagttcgattttctcgacgctatgccagaccaaagatgtcgatgccgcctacgcctggagtgaagaaaacgcaccgttgcagcgaaaagctcagattattcagcaacattatcgcggtgatgatccgctgaaaaagaaaatcgccagtgtgtttcttgaatcttttttgttctattccggtttctggctgccgatgtatttttccagccgcggaaagctgaccaataccgcggacctgatccgtctgattatccgcgatgaagcagtccacggttactacataggctataaatatcagaaaaacatggaaaagatatctctgggacaacgtgaagagttgaagagtttcgccttcgatttgttgctggaactctacgacaacgagttgcaatacaccgatgagctgtacgccgaaaccccgtgggctgacgatgtgaaagcgtttctctgttacaacgccaataaggctttgatgaatctgggctacgaaccgttatttcccgcagaaatggcggaagtgaatccggcaatcctcgccgcgctttcgccgaatgccgatgaaaatcacgatttcttttccggttcaggctcctcttatgtgatggggaaagcggttgaaacagaagatgaagactggaatttctgagggtgttattttcaaaaatatcactacccgcagcagggaaataattcccgccaaatagctttttatcacgcaaataatttgtggtgatctacactgatactctgttgcattattcgcctgaaaccacaatattcaggcgttttttcgctatctttgacaaaaaatatcaactttctcgatttgctctcagcccttatatcacgggaaattccggcgatttgctcgcatcaatattcatgccacatttgccatcaggggttgcctcagattctcagtatgttagggtagaaaaaagtgactatttccattgggtaatatatcgacatagacaaataaaggaatctttctattgcatggcaattaaattagaaattaaaaatctttataaaatatttggcgagcatccacagcgagcgttcaaatatatcgaacaaggactttcaaaagaacaaattctggaaaaaactgggctatcgcttggcgtaaaagacgccagtctggccattgaagaaggcgagatatttgtcatcatgggattatccggctcgggtaaatccacaatggtacgccttctcaatcgcctgattgaacccacccgcgggcaagtgctgattgatggtgtggatattgccaaaatatccgacgccgaactccgtgaggtgcgcagaaaaaagattgcgatggtcttccagtcctttgccttaatgccgcatatgaccgtgctggacaatactgcgttcggtatggaattggccggaattaatgccgaagaacgccgggaaaaagcccttgatgcactgcgtcaggtcgggctggaaaattatgcccacagctacccggatgaactctctggcgggatgcgtcaacgtgtgggattagcccgcgcgttagcgattaatccggatatattattaatggacgaagccttctcggcgctcgatccattaattcgcaccgagatgcaggatgagctggtaaaattacaggcgaaacatcagcgcaccattgtctttatttcccacgatcttgatgaagccatgcgtattggcgaccgaattgccattatgcaaaatggtgaagtggtacaggtcggcacaccggatgaaattctcaataatccggcgaatgattatgtccgtaccttcttccgtggcgttgatattagtcaggtattcagtgcgaaagatattgcccgccggacaccgaatggcttaattcgtaaaacccctggcttcggcccacgttcggcactgaaattattgcaggatgaagatcgcgaatatggctacgttatcgaacgcggtaataagtttgtcggcgcagtctccatcgattcgcttaaaaccgcgttaacgcagcagcaaggtcttgatgcggcgctgattgatgcgccgttagcagtcgatgcacaaacgcctcttagcgagttgctctctcatgtcggacaggcaccctgtgcggtgcccgtggtcgacgaggaccaacagtatgtcggcatcatttcgaaaggaatgctgctgcgcgctttagatcgtgagggggtaaataatggctgatcaaaataatccgtgggataccacgccagcggcggacagtgccgcgcaatccgcagacgcctggggtacaccgacgactgcaccgactgacggcggtggtgctgactggctgaccagtacgcctgcgccaaacgtcgagcattttaatattctcgatccgttccataaaacgctgatcccgctcgacagttgggtcactgaagggatcgactgggtcgttacccatttccgtcccgtcttccagggcgtgcgcgttccggttgattatatcctcaacggtttccagcaattgctgctgggtatgcccgcaccggtggcgattatcgttttcgctctcatcgcctggcagatttccggggtcggaatgggtgtggcgacgctggtttcgctgattgccatcggcgcaatcggtgcctggtcgcaggcaatggtgactctggcgctggtgttaaccgccctgctgttctgtatcgtcatcggtttgccgttggggatatggctggcgagaagtccgcgagcggcgaaaattattcgtccactgcttgatgccatgcagaccacgccagcgtttgtttatctggtgccaatcgtcatgctatttggtatcggtaacgtgccgggcgtggtggtgacgatcatctttgctctgccgccgattatccgtctgaccattctggggattaaccaggttccggcggatctgattgaagcctcgcgctcattcggtgccagcccgcgccagatgctgttcaaagttcagttaccgctggcgatgccgaccattatggcgggcgttaaccagacgctgatgctggccctttctatggtggtcatcgcctcgatgattgccgtcggcgggttgggtcagatggtacttcgcggtatcggtcgtctggatatggggcttgccaccgttggcggcgtcgggattgtgatcctcgccattatcctcgatcgtctgacgcaggccgttgggcgcgactcacgcagtcgcggcaaccgtcgctggtacaccactggccctgttggtctgctgacccgcccattcattaagtaactctgcacttgcccggtgacgccgggcattatcaccctgccaaaaaaaggaataacaatgcgacatagcgtactttttgcgacagcgtttgccacgcttatctctacacaaacttttgctgccgatctgccgggcaaaggcattactgttaatccagttcagagcaccatcactgaagaaaccttccagacgctgctggtcagtcgtgcgctggagaaattaggttataccgtcaacaaacccagcgaagtagattacaacgttggctacacctcgcttgcttccggcgatgcaaccttcaccgccgtgaactggacgccactgcatgacaacatgtacgaagctgccggtggcgataagaaattttatcgtgaaggggtatttgttaacggcgcggcacagggttacctgatcgataagaaaaccgccgaccagtacaaaatcaccaacatcgcacaactgaaagatccgaagatcgccaaactgttcgataccaacggcgacggaaaagcggatttaaccggttgtaaccctggctggggctgcgaaggtgcgatcaaccaccagcttgccgcgtatgaactgaccaacaccgtgacgcataatcaggggaactacgcagcgatgatggccgacaccatcagtcgctacaaagagggcaaaccggtgttttattacacctggacgccgtactgggtgagtaacgaactgaagccgggcaaagatgtcgtctggttgcaggtgccgttctccgcactgccgggcgataaaaacgccgataccaaactgccgaatggtgcgaattatggcttcccggtcagcaccatgcatatcgttgccaacaaagcctgggccgagaaaaacccggcagcagcgaaactgtttgccattatgcagttgccagtggcagatattaacgcccagaacgccattatgcatgacggcaaagcctcagaaggcgatattcagggacacgttgatggttggatcaaagcccaccagcagcagttcgatggctgggtgaatgaggcgctggcagcgcagaagtaatttttattcgggcggataaggcgtttttgccgcatccgccgttctgtgcacaatgcctgatgcgacgctggcgcgtcttatcatgcctacaaaccacatcgcacatttcaacaatctatctttcatcccatattcatcaacatccgctattattgatttccagcttaatcatcacctgatgaacaaaaataatgactaaacctaatcatgagcttagcccggcgctgatcgtgctgatgtctatcgccaccggtctggcggtagccagtaactattacgcccagccattgctcgacaccatcgcgcgtaacttttccctttccgccagttcggcaggctttattgttaccgccgcgcagttgggctatgccgcaggtctactgtttcttgttcccctcggtgatatgtttgaacgccgccgcctgattgtctcgatgaccttactggcggcatgttgattaccgccagcagtcagtcgctggcgatgatgatcctcggtacggcattaaccggtttattctcagtcgtggcacaaattctggttccgctggcagcgacgctggcttcaccggataaacgcggcaaagtggttggcactattatgagcggtctgctgttggggatcttgctggcacggacagttgccggattgctggcgaatctcggcggctggcgcaccgtcttttgggttgcttcggtgttaatggcactgatggcgctggcattatggcgtggtctgccacaaatgaaatcagaaacccacctcaactacccacagttgttgggttccgttttcagtatgtttatcagcgataaaattctgcgtacccgcgcgttgctgggctgcctgacctttgccaatttcagcattctctggacctcaatggcctttttgcttgccgctccaccttttaactacagcgatggtgtcattggtctgtttggacttgcgggagctgccggagcgttgggcgctcgtccggcgggcggttttgccgataagggcaaatcgcaccacaccacaactttcggtctgctgctgctattactttcatggctggcgatctggtttggtcacacttccgtactggcgttgattatcggaatcctggtgctggatctcaccgtgcagggcgtgcatatcactaaccagacggtaatttatcggatacatcctgatgcgcgcaatcgcctgaccgcaggttacatgactagctactttattggcggtgccgccggttcgctaatttcagcctcagcctggcaacatggcggttgggctggcgtttgtctggctggcgcgacgattgccctggttaacttactggtctggtggcgaggttttcatcgtcaggaagccgcaaattaagcaatcagcaaccgttttcgtggctttacacttataagggtgttaagaagcccatcagtctgataaggttaagatattcattcagtctatttataatattaacaatcgttaagcgtacactctatggaaagccctactccacagcctgctcctggttcggcgaccttcatggaaggatgcaaagacagtttaccgattgttattagttatattccggtggcctttgcgttcggtctgaatgcgacccgtctgggattctctcctctcgaaagcgtttttttctcctgcatcatttatgcaggcgcgagccagttcgtcattaccgcgatgctggcagccgggagtagtttgtggattgctgcactgaccgtcatggcaatggatgttcgccatgtgttgtatggcccgtcactgcgtagccgtattattcagcgtctgcaaaaatcgaaaaccgccctgtgggcgtttggcctgacggatgaggtttttgccgccgcaaccgcaaaactggtacgcaataatcgccgctggagcgagaactggatgatcggcattgccttcagttcatggtcatcgtgggtatttggtacggtaataggggcattctccggcagcggcttgctgcaaggttatcccgccgttgaagctgcattaggttttatgcttccggcactctttatgagtttcctgctcgcctctttccagcgcaaacaatctctttgcgttaccgcagcgttagttggtgcccttgcaggcgtaacgctattttctattcccgtcgccattctggcaggcattgtctgtggctgcctcactgcgttaatccaggcattctggcaaggagcgcccgatgagctatgaggttctgctgcttgggttactagttggcgtggcgaattattgcttccgctatttgccgctgcgcctgcgtgtgggtaatgcccgcccaaccaaacgtggcgcggtaggtattttgctcgacaccattggcatcgcctcgatatgcgctctgctggttgtctctaccgcaccagaagtgatgcacgatacacgccgtttcgtgcccacgctggtcggcttcgcggtactgggtgccagtttctataaaacacgcagcattatcatcccaacactgcttagtgcgctggcctatgggctcgcctggaaagtgatggcgattatataacccacaagaatcatttttctaaaacaatacatttactttatttgtcactgtcgttactatatcggctgaaattaatgaggtcatacccaaatggatagttcgtttacgcccattgaacaaatgctaaaatttcgcgccagccgccacgaagattttccttatcaggagatccttctgactcgtctttgcatgcacatgcaaagcaagctgctggagaaccgcaataaaatgctgaaggctcaggggattaacgagacgttgtttatggcgttgattacgctggagtctcaggaaaaccacagtattcagccttctgaattaagttgtgctcttggatcatcccgtaccaacgcgacgcgtattgccgatgaactggaaaaacgcggttggatcgaacgtcgtgaaagcgataacgatcgccgctgcctgcatctgcaattaacggaaaaaggtcacgagtttttgcgcgaggttttaccaccgcagcataactgcctgcatcaactctggtccgcgctcagcacaacagaaaaagatcagctcgagcaaatcacccgcaaattgctctcccgtctcgaccagatggaacaagacggtgtggttctcgaagcgatgagctaacgcgtcatctcgctcaaaaatccagatttataaaagaaaaaatgactggccagcatcgcaacatgctggcctttttggcaagcaggtcggctcagccgatgagttaagaagatcgtggagaacaatatgagcgcaaatgcggagactcaaaccccgcagcaaccggtaaagaagagcggcaaacgtaagcgtctgctcctccttctcaccttgctctttataattattgccgtagcgatagggatttattggtttttggtactgcgtcacttcgaagaaaccgatgacgcatacgtggcagggaatcaaattcaaattatgtctcaggtgtctggcagcgtgacgaaagtctgggccgataacaccgattttgtaaaagaaggcgacgtgctggtcactctcgacccgacagatgctcgccaggcgtttgaaaaagccaaaactgcactggcttccagcgttcgccaaacccaccagctgatgattaacagcaagcagttgcaggcgaatattgaggtgcagaaaatcgccctcgcgaaagcacaaagcgactacaaccgccgtgtgccgctgggcaatgccaacctgattggtcgcgaagagctgcaacacgcccgcgacgccgtcaccagtgcccaggcgcaactggacgtcgcgattcaacaatacaatgccaatcaggcgatgattctggggactaaactggaagatcagccagccgtgcaacaggctgccaccgaagtacgtaacgcctggctggcgctggagcgtactcgtattatcagtccgatgaccggttatgtctcccgccgcgcggtacagcctggggcgcaaattagcccaacgacgccgctgatggcggtcgttccagccaccaatatgtgggtggatgccaactttaaagagacgcagattgccaatatgcgtatcggtcagccggtcactatcaccacggatatttacggcgatgatgtgaaatacaccggtaaagtggttggtctggatatgggcacaggtagcgcgttctcactgcttccagcgcaaaatgcgaccggtaactggatcaaagtcgttcagcgtctgcctgtgcgtatcgaactggaccagaaacagctggagcaatatccgctgcgtatcggtttgtccacgctggtgagcgtcaataccactaaccgtgacggtcaggtactggcaaataaagtacgttccactccggtagcggtaagcaccgcgcgtgaaatcagcctggcacctgtcaataaactgatcgacgatatcgtaaaagctaacgctggctaatccagaggtgcgtgtgatgcaacagcaaaaaccgctggaaggcgcgcaactggtcattatgacgattgcgctgtcactggcgacattcatgcaggtgctggactccaccattgctaacgtggcgatccccactatcgccgggaatctgggctcatcgctcagccagggaacgtgggtaatcacttctttcggggtggcgaatgccatctcgatcccgcttaccggctggctggcaaagcgcgtcggggaagtgaaactgttcctttggtccaccatcgcctttgctattgcgtcgtgggcgtgtggtgtctccagcagcctgaatatgctgatcttcttccgcgtgattcaggggattgtcgccgggccgttgatcccgctttcgcaaagtctattgctgaataactacccgccagccaaacgctcgatcgcgctggcgttgtggtcgatgacggtgattgtcgcgccaatttgcggcccgatcctcggcggttatatcagcgataattaccactggggctggatattcttcatcaacgtgccgattggcgtggcggtggtgttgatgacactgcaaactctgcgcggacgtgaaacccgcaccgaacggcggcggattgatgccgtggggctggcactgctggttattggtatcggcagcctgcagattatgctcgaccgcggtaaagagctggactggttttcatcacaggaaattatcatccttaccgtggtggcggtggtggctatctgcttcctgattgtctgggagctgaccgacgataacccgatagtcgatctgtcgttgtttaagtcgcgcaacttcaccatcggctgcttgtgtatcagcctcgcgtatatgctctacttcggcgctattgttctgctgccgcagttgttgcaggaggtctacggttacacggcgacctgggcaggtttggcctctgcgccggtagggattattccggtgatcctgtcgccgattatcggccgcttcgcgcataaactggatatgcggcggctggtaaccttcagctttattatgtatgccgtctgcttctactggcgtgcctatacctttgaaccaggtatggattttggcgcgtcggcctggccgcagtttatccaggggtttgcggtggcctgcttctttatgccgctgaccaccattacgctgtctggtttgccaccggaacgactggcggcggcatcgagcctctctaactttacgcgaacgctggcggggtctatcggcacgtcgataaccacgaccatgtggaccaaccgcgagtcgatgcaccatgcgcagttgactgagtcggtaaacccgttcaacccgaatgcccaggcgatgtacagtcaactggaagggcttgggatgacgcaacagcaggcatcaggctggattgcccagcagatcaccaatcaggggctgattatttccgccaatgagatcttctggatgtcagccgggatattcctcgtcctgctggggctggtgtggtttgctaaaccgccatttggcgcaggtggcggcggaggcggtgcgcactaagtacaactaagccagttcatttgaactggcttttttcaattaattgtgaagatagtttactgactagatgtgcagttcctgcaacttctctttcggcagtgccagttcttcgttgctgttgatgcgtacgtcacgttccagaatgctacgcgcaatatcctgcgcttcctgcaacgagtgcatctggtaagtgccacactggtagacgttcagttccgggatctgattctgatcctgcactttcagcacgtcttccattgccgctttccaggcatcagcaacacgctgctcatctggcgtaccaatcagactcatataaaaaccggtgcggcagcccattggcgagatatcgataatctctacaccattaccgttaagatggttacgcataaaaccagcaaacaggtgctccagggtatggatccctctttctggcatcacttctttgttcggcacgcagaagcgcagatcgaacacggtgattgcgtcgccatgcggggtgttcattgttttcgccacccgaactgcaggcgcttccatccgggtatgatcgactgtgaagctatctaacaacggcatttagccacctccggtaatttttttaaaaattttctgaactctttcttcccaggcgagtctgagtatatgaaagacgcgcatttgttatcatcatccctgaattcagagatgaaattttggccactcacgagtggcctttttcttttctgtcaggcgtgtttttccagccacaccgcaaacggttcggtatcagcggcttccatttcctgctgacggcgttcagacgcctcgcgctcggctacaaaatcctcttcgcgcagaatttccagcggctcttcacgcagcagattacggtaggcttctgcaaatgctttgcctgttccgccaataccagtatcaatcatagaccttaagatacgggcagagaaagtcagatcgggattatcgaagcaggcaaccagttcatcacacactttctgatacgcttcgccgccgttaatactatccagcgtttgcgcgacgcgtttcagatcgcggaacagatctttacccacctgcggtaacgggaactgtgcggtttcgcagccgatacccagcgtcagacccggtttgcgaccttcgaggatcacccggttccagttaacgcgtgtacaggcaagttcgctactgctcatttccggtgcatcagccagcgcacaccagaccataaacaggtcgaggaatcgcacctgctgttcatctacaccaatcggcgagaacgggttgatgtccagcgaacgcacttcaatatattcaatgccgccacgtaacagcgcatcagaaggcgactcgccgctgcgggtaacgcgttttggacgaatcggcgcgtacagttcgttttcaatctgcaacacgttgctgttgatttgcagcctcttaccgtctttctcaataccaatcttcgcgtactcttccgatggcgttttgattgcctgtttaaggcccgctacgtactcgtaaagatcgttgaaggtaataccaagattgctttgcgatttattggtatagccgagatcgctcaaacgaagagaggtcgcatacggcaggtaatacataccgcactcggttttctcaaacggcagcgacgttggttttccttgcaggaaagaagaacaaatcgccggagatgcaccaaacagataaggaatgacccaaccgaaacgatagtaattgcggataacgcggaaatagcccgcagaaattttctctttggcatcagcgcccgagatatcaccgcacttcgcttgccagaatgccattggcaaagagaaattgtagtgcacgccggaaatggtttgcatcagcgcgccgtagcgatttttcagcccttcacgatacagcgttttaaagcgtccggtgttagaagtgccgtactgtgccagttcgatgtcctgaccttctgcgatgtagcatggcatacttaacggccacatccgctcatcgcccatattgcgcgccgtataacgatgcagatcgcgcataaaggtcagcatatgttcaatatcaccatccactggtgtaatgaattccagcaatgcttccgcaaaatcggtagtaatccatttgtgcgtcagtgcggaacctaatgcttcaggatgacctgttgttgccagtgtgccatcagcattaacacgcaaagtttcgcgctccagcccacgctgtatcccctttaacgcctgaggatgtttttccagccaggccagcgcctgtgatacgtccgggatcaaattgacctcccgcctgtcaaaatcgttttaattagcataactgtaatggtgaccatatgtgcaggcctacaattagtgccaccacatcatgccctgaacggtcgctgctgcaactgcaacatagcgtaacgctttaccaaggcacaaaaaaaagattaccggtccccacgagatgcgcatccatcccgctaacagacacagtaaatcgccaaccacgggcatccagcttaataatagcgtgactgcaccatagcgtttcagccagccggtagctttctcttgccagcgcgatgttttacgcaatggaaagaaacgcccaaggataacgttagttaaccctccaaggctattacccattgttgctgttaaaactaaaacccagggatgactgatcccggaaagcaacattgccaccagcacgacttcggagttgccgggtaatagtgtagcgctgagaaaactactggcaaacaacgagaaaagcgataacgcttcactcacagcaagcgaacatccacggcgtccatgcctgctgcacgggccgcctgaataccgaaatcggcatcttcaaagaccacacactgcgtcggttgcacgcccatacgctgcgcgcacaacaaaaatgtgtctggcgcgggtttatggtgtttgacgtgatcggcagcgacgacggcgtcaaaataatggcgtaatcccaggtgcgccagcaatgcctcagcgatggcgctttcactccccgttcctacagccattgggcgacgaccatgccaacttttcaccacatcaacaagaggaagcggttcgacgctatccagcagcatacttcttactgcttctgttttttcacgcgctaacgcatgcgggtcgagatcggcctgattcagctcaataattgcctgagcaatacgccaggtgggcgatccattaagcgcaatcatcgcctgaatatcgtactgaagaccgtagtgccctaatacttcgcgccacgctttacggtgcgtaggctccgtatccaggattgtgccatccatatcaaaaattaaacctgcataacgctcgtacatggtcttctcgcaagtcgaaaaatatgacgctactttagcgtaattgcttgattttgtcgctgatggcgaaggagaagaaaattcaggaaatggataaaggagttatttagaaatgagatatttttgaaggaaattttttggagaagatggtgcatccgggaggatgactcactgacgttcgcccttcgggccgttgctggcgcaacgttatccttcctggtgcctgcggttaataccgctatctcttcgataccttcattgctgaaggttacggagaatatggtgcatccgggaggattcgaacctccgaccgctcggttcgtagccgagtactctatccagctgagctacggatgcatcgggaaaacttattctactgctgatattgataccgctactaaagccatatcaattaagagatggtgcatccgggaggattactcgccttgcggctcgcccttcgggccgttgctaaagcaacgttatcatccctagtgcctgcggttaattccgctacctcttcgataccttcattgctgaagatttcggagaatatggtgcatccgggaggattcgaacctccgaccgctcggttcgtagccgagtactctatccagctgagctacggatgcatcgggaaatttattttactgctgatattgataccgctactaaagccatatcaagtaagagatggtgcatccgggaggattcgaacctccgaccgctcggttcgtagccgagtactctatccagctgagctacggatgcatcgggaaacttactttactgcagattttttgataccgctactaaagccgtatcaagtaagagatggtgcatccgggaggattactcgccttgcggctcgcccttcgggccgttgctaaagcaacgttatcctccctggtgcctgcggttattaccgccacctcttccataccttcatcgctgaaagtacgtagaatatggtgcatccgggaggattcgaacctccgaccgctcggttcgtagccgagtactctatccagctgagctacggatgcaaatggcggtgaggcggggattcgaaccccggatgcagcttttgaccgcatactcccttagcaggggagcgccttcagcctctcggccacctcaccacacgcctcttacgagtgcttcgaagaacttgtttatcgctcatcgtcgctgcgtggcgcacatattactttctgagacttataagtcaaacaatttttcctacacttttatcgtttgcacacttcacgttcaattagtctgtaaaaacgtcaaaaagagtgttttatcaacagaagaatggaggtctgacagatagtagtaatgcaaaaaaatggagacttaagttgaatgaacgggagtaaagcgaaaagactatagagtgaaggagaaattttgagggtgcgtctcaccgataaagatgagacgcggaaagattagtaactggactgctgggatttttcagcctggatacgctggtagatctcttcacggtgaacagaaacttccttcggggcatttacgccaatacgtacctggttgccctttacccctaaaactgtcacggtgacctcatccccaatcatgagggtctcaccaactcgacgagtcagaatcagcattctttgctccttgaaagattaaaagagtcgggtctctctgtatcccggcattatccatcatataacgccaaaaagtaagcaatgacaaacacattacatctaagcagtcatggcattacattctgttaaacctaagtttagccgatatacacaacttcaacctgactttatcgttgtcgatagcgttaatgcgaatgccgtgaagcgagtccacggcattgcctgacgcttatattattgcaatttcgcgctgacccagcctttcacactggctaacgctgcaggtaaggccgcagcatccgtaccaccggcttgcgccatgtcaggacgtccaccacccttgccgcccacctgctgagcgaccataccaatcagttcccctgctttcacacgatctgtgacgtccttagatacgcctgcaatcagagaaaccttaccttcgactaccgttgccagcacgataattgtcgaccccagctgattttttaaatcgtcaaccatggtacgcaacattttcggctcaacaccgctaagctcgctaaccaacagcttaacaccattaacatcaattgccttactggaaagatttgcgctctcctgtgcggcagcttgttctttaagctgttgtaactctttttccagctgacgcgtacgttccagtactgagcgcactttatcagccagattattgctatcgcctttcagcagatgcgcgacttcgcttaagcgatcgctgtctgcatgaacggtggcgatagcaccttctccggttaccgcttcgatacgacgaacgcctgcagcagtacccgattcagagatgatgcggaacagaccaatatcaccagtgcggctggcgtgagtaccgccacacaactcggtagagaaatcgcccatgctcagcacgcgtacgcgctcatcatacttctcgccgaacagcgccatcgcacctttcgctttcgccgcttcgagatccatgatgttggtttcgatcggcaaattgcgacgaatctgtgtgttcaccaggtcttcgaccgcacgaatctcttctggtttcatcgcttcgttgtgtgagaagtcgaagcgcagcaccttgtcgttaaccagtgaacctttctgcgatacatgagtacccagaacctggcgcagcgcagcgtgcatcaggtgcgttgcggagtgattcagacgaatacgggcgcgacgagcctcatcaacatcagcctgcaccgcgtcgcccactttcagagaacccgcagcaagtttaccgatgtgaccaatcgcctggccgtatttctgcgtatcttccaccgcaaaggagaagttagcgcctttcagttcgcctttatcgccaacctgaccgccggattccgcatagaatggcgtttgatccagcacgaccacagcttcctggcctgcattgatggcatcaaccgctttaccatcaacaaacagcgcagtcactttgccgttcagttccagatggtcatagcctttaaattcagatgcactgtcaacacggatcattgcgttgtaatcggcaccaaagccgctggcttcgcgcgcgcgacgacgctgctcttccattgcagcttcaaaaccagcttcgtcaactttgatgttgcgctcacgacaaacatcagccgtcaggtcaaccgggaagccataggtgtcgtacagacggaaagcagtttcaccatccagcgtatcaccagaaagttttgccagctcttcatccagcaacgccagaccgcgctccagagtacgagcaaactgctcttcttcagtcttcagcacctgctcaacctgcgcctgctggcgtttcaggtcttcacccgcagagcccataacgtcgatcagcggaccaaccagtttgtagaagaaggtttctttcgcgccgagcatattaccgtgacgcactgcgcgacgaatgatacgacgcagtacataaccacggttttcattggacggcattacgccatccgcgatcaggaacgcacaagaacgaatgtggtcagcgattacgcgcagcgatttattgctcagatcggttgcgccagtgactttcgctaccgcctggatcagcgtgcggaacaggtcgatgtcatagttagagttaacgtgttgcagcaccgcagcaatacgctccagacccataccggtatctacagacggcttcggcagcggttccatcgtgccatcggcctggcggttgaactgcatgaagacgatgttccagatctcaatgtagcggtcgccgtcttcttccgggcttcccggagggcccccccaaatgtggtcgccgtgatcgtagaagatttcggtgcacgggccgcacggaccagtgtcacccatctgccagaagttgtcagatgcgtatggcgcacctttgttatcgccgatgcgaataatacgttcgcgcgggatccctacttctttttcccagatttcgtaggcttcgtcgtcgctttcatagacggtaacccacagacgctctttcggcagggcaaaccatttttcgctggtcagcagttcccatgcaaactgaatggcatcgtgtttgaaatagtcgccgaagctgaagttgcccagcatttcgaagaaggtatggtgacgcgcggtgtaaccgacgttttccaggtcgttgtgtttaccacccgcacgcacgcagcgttgggaagtggtagcgcgggaataattacgcttgtcgagcccaaggaacacatccttgaactggttcatcccggcgttggtaaacaacaaagttgggtcgttatggggtaccagggagctgctggcaactacctgatgtcccttactatggaaaaagtcgagaaacgcctgacggatctcagcggtgctcttgctcataattatcctgaaatcaagctaacgaaatatcgccaccagctccagcgtgtcttaaccgccgggctggtaactgaaaagtgggaataagataagttttcttgactgggaagtaaaataccgtatgcgttcagtcggcaaaatttcgccaaatctcctggatatcttccatcagatagccacgatagagcagaaaacgctggatcttaactttttctgaaaagacagttggcaaaggttcgccatattttcgcgtcgcctgatcgcgcgccagtgcgcaccagtcgatgtcacattcacgcatcgctttttctgtcgcttcgcgggaaatacctttctgattcagttcctggcgaatacgcgcaggtccataacctttgcggctacggctggcgataaagcgcgcaacaaatcggctgtcatcgagatagccatgttcatggcaccaggcaataacgcgctcgtaatcttctgccgtagcatcaatctcttctgggccatttttgcccataatcggtgccgcgagtttacgtcgcagttcttgctcactgtgatcgcgcaccgccagaatgcgtaccgcacgatccaacaggcgagcatatgccgggcgacgggatgttgattctgtcatggcatatccttacaacttaaaaaagcaaaagggccgcagatgcgacccttgtgtatcaaacaagacgattaaaaatcttcgttagtttctgctacgccttcgctatcatctacagagaaatccggcgttgagttcgggttgctcagcagcaactcacgtactttcttctcgatctctttcgcggtttccgggttatctttcagccaggcagtcgcattcgctttaccctgaccgatcttctcacctttgtagctgtaccacgcgcctgctttctcgatcagcttctcttttacgcccaggtcaaccagttcgccgtagaagttgataccttcgccgtagaggatctggaattcagcctgtttaaacggcgcagcgattttgttcttcaccactttcacgcgggtttcgctacccaccacgttttcgccctctttcaccgcgccgatacgacggatgtcgagacgaacagaggcgtagaatttcagcgcgttaccaccggtagtggtttccgggttaccgaacatcacaccaattttcatacggatctggttgatgaagatcagcagcgtgttggactgcttcaggttacccgccagcttacgcatcgcctggctcatcatacgtgccgcaaggcccatgtgagagtcgccgatttcgccttcgatttccgctttcggcgtcagtgccgccacggagtcaacgacgataacgtctactgcgccagaacgcgccagggcgtcacagatttccagtgcctgctcgccggtgtccggctgggagcacagcaggttgtcgatatcgacgcccagtttacgtgcgtagattgggtccagcgcgtgttcagcatcgataaacgcacaggttttaccttcacgctgcgctgcggcgatcacctgcagcgtcagcgtggttttaccggaagattccggtccgtagatttcgacgatacggcccatcggcagaccacctgccccaagcgcgatatccagtgaaagcgaaccggtagagatggtttccacatccatggaacggtcttcacccaggcgcatgatggagcctttaccaaattgtttctcaatctggcccagtgctgccgccaacgctttctgtttgttttcgtcgatagccatttttactcctgtcatgccgggtaataccggatagtcaatatgttctgttgaagcaattatactgtatgctcatacagtatcaagtgttttgtagaaattgttgccacaaggtctgcaatgcatacgcagtagcctgacgacgcaccgcatcacggtcgccgctgaagcattcccgccgggtaatgccttcaccgcgggcagtggcaaaagcaaaccagacggtgccgacaggcttctcttcactgccgccatccggcccggcgataccactaatagacacggcataatcagcacgagccgctttcagtgcgcctatcgccatttccaccacgacgggttcactcaccgcgccatgctgcgccagcgtctcttcgcgtacgccgatcatctgcgctttggcttcgttactgtaggtgacaaatccgcgttcaaaccaggcggagctaccggcaatatcggtaatcactttcgctacccaaccaccggtacaagactcggcagttgttacggttgcgccacgggctttcagcgcctgcccaacctgttcacttaactgcatcagttcactgtcagtcatcacaacctctgtcagtcaaaaatttatgccggacaagatagcactttcgtcaggaagatggtgttggcgttgcaattttacgaggaggattcagaaaaaagctgattagccagagggaagctcacgcccccctcttgtaaatagctactgtactcgcgccagcgccacggcttgtcctaactgccagaccgccattgcgtaatgggtgctgtggttgtaacgggtgatggtgtagaagttcggcagaccgtaccagtactggtagccggtgccaacatccagacgcagcaggctggcttgttgatggttgcccagcggctgctgtggcgttaaacctgcggcggcaagctgcgaaatgctgtacttagttttgaagccatttggcaagcctggagcctgaccgtttgccattaccgcgacctgatcgcctttcacccagccgtgcgctttgaaatagttcgccacgctaccgatcgcatcaaccggatcccacaggttgatatgcccgtcgccgctgaaatctaccgcatattgtttgtaagacgacggcataaactgtccgtagcccatcgccccggcaaaggaacctttcagattgagcggatcgtcctgctcgtcgcgcgccatcaacaggaaggtttccagctcgccagagaaatactccgcgcggcgtgggtagttaaatgacagcgttgccagcgcatcgaggatgcgagttttccccatcacgcgcccccagcgggtttcaacgccgataatcccgacgataatttccggcggtactccatacacctgccacgcgcgattcaacgcatcttcatactgattccagaaaaccacaccgttctgcacgttgtccggcgtaataaattttttgcgataacggagccatgcgccgttcggacctgatggcggtttcaccgatgtggttggtgcctggttatccatcagccgcagtaccgaatccagacgcttcgcctgggagagaatttcctgcaactgctgacgatcgaaaccgtgtttgttcaccattttgtcgatgaactgctgggcattcgggttattagcgaaatcgccgcccatctgcatcacattgtgctgcggctcaagcaggaagccgccagacggcgttccggtggtcgtatcagtctcagtaggttttggcttgctgctacaggcggcaagcaacacaaaaaggggaagcaatgttacataacgacgcttgaacatgaggggtccatttaacagattcaaccaggggcaagtatggtaaagcatcacgccccgcacaaggaagcggtagtcactgcccgatacggactttacataactcaactcattcccctcgctatccttttattcaaactttcaaattaaaatatttatctttcattttgcgatcaaaataacacttttaaatctttcaatctgattagattaggttgccgtttggtaataaaacaataaatcctgaaggagagaacaatgatagaaaccattactcatggtgcagagtggtttatcgggctgttccaaaagggcggagaggtgtttaccgggatggtgaccggcattcttccgctgttgattagcctgctggttatcatgaacgcactgattaattttatcggtcagcatcgtattgaacgttttgctcaacgttgcgccggtaaccctgtttcccgttacctactgttaccgtgcattggcacgtttgtcttttgcaatccgatgaccctaagcctgggtcgctttatgccggaaaagtacaaacccagctactacgcggcggcctcttatagctgccactcaatgaatggcctcttcccccatatcaaccctggcgaactgtttgtttatcttggcattgccagcggtctgacaacgctgaacctgccacttggcccactggcggtgagttatctgctggttggtctggtcaccaatttcttccgcggctgggtgaccgatctgaccaccgccatttttgagaaaaagatgggcattcaacttgaacaaaaagttcagcctggcaggagcaacatcatgacgcatattcggatcgaaaaaggaacgggtggctggggcggcccgcttgagctgaaagccacgccgggaaaaaaaatcgtctatatcaccgccggtacccggcctgcgattgttgacaaactggcacagcttactggctggcaggctattgacggatttaaagaaggtgaacccgcggaggcggaaattggtgtcgcggtaatcgactgtggcggcacattacgctgcggcatctatccgaaacgacgtattcccaccattaatatccactcgacgggcaagtccggtccgctggcgcagtacattgtggaagatatttatgtctctggcgtaaaagaagaaaacatcactgtagtaggtgatgcgacaccacaaccctcttccgtgggccgtgactatgacaccagtaagaaaatcaccgaacaaagcgatggtttactggcgaaggtgggaatgggcatggggtccaccgttgcggtgctgtttcaatctggtcgtgacaccatcgacactgtattaaaaaccattctgccgtttatggcattcgtctcggcgctcattggcatcattatggcttctggccttggtgactggattgcccacggtcttgctccgctggcgagccatccactgggtctggtcatgctggcgctcatctgttccttcccactgctttcacctttcctcggcccaggcgcagttatcgcacaggttatcggcgtattgattggcgtgcagattggtctcggcaatattccgccgcatctggctttaccggcactgtttgccatcaacgcgcaggcggcctgcgacttcatcccggtcggtttgtcgctggcggaagcccgtcaggacacggttcgcgtcggtgtcccttctgtactggtgagccgctttttaaccggcgcgccgactgtactgatcgcctggtttgtctccggttttatctatcaatagaggctgaaacatgaccgttatttatcagaccaccatcacccgtatcggcgcgagtgccattgacgccctcagtgaccagatgctcatcacctttcgtgaaggcgcgcctgcggacctcgaagagtattgcttcattcattgccacggcgagttgaaaggtgcactccatcccggtttgcaattttcactcgggcagcatcgctatccggtgaccgctgttggcagcgtggcggaagacaaccttcgcgaactgggtcatgtcaccctgcgcttcgatggtttaaacgaagcggaatttccgggcactgtccatgtggcaggccctgtccccgacgatatcgcgccgggatcggttttgaagtttgaatctgttaaggagtaaaaaatgaatcaggttgccgttgtcatcggtggtgggcaaaccttaggcgcgttcctgtgccacggtctggctgccgaggggtatcgcgtcgcggttgtcgatattcagagcgacaaagccgcaaatgtggcacaagaaattaacgccgaatatggtgaaagtatggcgtacggttttggtgctgacgccactagcgagcaaagcgttctggcgctctctcgtggggtagatgaaatctttggtcgcgtggatttgctggtctacagcgccggaatagcaaaagcagcctttatcagcgacttccagctcggcgattttgaccgttcgctacaggtgaatctggtgggttatttcctgtgtgcgcgtgaattttcgcgtttgatgatccgcgacgggattcaggggcgcattattcagatcaactcgaaatccggcaaagtgggcagcaaacacaactctggctacagcgcagcgaaatttggtggcgtcgggctgactcaatcactggcgctggatctggcggagtacggcattacggtgcattcactgatgctcggtaacctgctgaaatcgccgatgttccagtcactgttgccacaatacgcgaccaagctgggtatcaaaccggatcaagtcgagcagtattacatcgacaaagtaccgctcaaacgcggctgcgattatcaagatgtgctgaatatgctgctgttctacgccagtcctaaggcgtcgtactgcaccggacagtcgatcaatgtcaccggcggtcaggtgatgttctgatcaacagcggagatccattaaggatctccgctgagactatagaatgcctgatgcgctacgctcatcaggcatacaggacttccgccactacattaaggaaaagttatggtatccgcactcatcaccgtcgccgttatcgcctggtgtgcgcaactggccttaggcggctggcaaatttctcgttttaaccgtgccttcgacacactatgccagcaagggcgggttggcgtgggccgttccagcgggcgctttaaaccgcgggtcgtggtcgccatcgcgctggacgatcagcagcgcatcgtcgacaccttgtttatgaaaggactgaccgtcttcgcccgaccgcaaaaaattcccgcaattaccggtatgcatgcgggtgatttacagcccgatgtgatctttccccatgatccactatcacagaatgctctatcattggcgcttaaactgaaacgtggataatttcgttgtgaatgttacttgcttgcgaagttatcattttgaaacctaaatcaggtaatcacgcccatgaaacctcgtcagcgtcaggccgccattctggagtatctgcaaaagcagggtaaatgctcggttgaagaattggcgcaatactttgacaccacaggcacaaccattcgcaaagatctggtcattctggaacatgccggaaccgtcattcgtacttatggcggagtggtgttgaataaagaggaatccgatccgcctatcgatcataaaacactcatcaacacccacaagaaagagctgattgcagaagctgccgttagttttatccatgatggcgattcgatcattcttgatgctggcagtaccgttttgcagatggttcccctgctctcgcgctttaataacatcacggtgatgaccaacagcctgcatatcgtcaatgcgctatccgaactggataacgaacaaactatcctgatgccaggcggaacgtttcgcaaaaaatcggcctcatttcacgggcaactggcagagaatgccttcgagcatttcaccttcgataaattgtttatgggcaccgacggcatcgatctcaatgcgggcgtaaccacctttaacgaggtttataccgtcagtaaggcaatgtgcaatgccgcgcgcgaagtgattttgatggcggactcatcaaagtttggccgtaaaagccccaacgtagtttgcagtcttgaaagcgtcgataagctgattaccgacgcaggtatcgatccggcgtttcgtcaggcgctggaagagaaagggatcgatgtgatcataaccggagagagcaatgagtgaagcactactgaacgcgggacgtcagacgttaatgctggagttgcaggaagcaagccgtttaccggaacgtctgggcgatgattttgttcgcgccgccaatatcatcctgcactgtgaaggcaaagtggtggtttcgggaattggcaaatcgggccacattggtaagaaaatcgccgcaacgcttgccagtaccggcactccggctttttttgtccatccggcagaagcgctgcacggcgatctggggatgatcgaaagccgcgatgtgatgctgtttatctcttactccggtggcgcgaaggaactggatctgattattccgcgtctggaagataaatctatcgcgctgctggcgatgaccggcaaaccgacgtcaccgctgggcctggcggcaaaagcggtgctggatatctccgtagaacgcgaagcctgcccgatgcaccttgcgccgacctccagcaccgtcaataccctgatgatgggtgacgcgctggcgatggcggtcatgcaggcgcgcggatttaatgaagaagattttgcccgctcccacccagccggggcactgggcgctcgcttgctgaataaagtgcatcatctgatgcgccgtgacgatgccatcccacaggtggcgttaaccgccagcgtgatggatgcgatgctggaactcagccgcaccggtctggggctggtggcggtatgtgacgctcaacaacaggtacaaggcgtctttaccgacggcgatttacgtcgctggctggttggcggcggcgcactcaccacgccagtcaatgaagcgatgacggtcggcggcaccacgttgcaatcgcaaagtcgcgccatcgacgccaaagagatcctgatgaagcgcaaaatcactgccgcaccggtggtggatgaaaacggcaaactcaccggcgcaataaacctgcaggatttctatcaggccgggattatttaatccttcaatcccagacgtttcgccagccgatgcaggttggcgacgtcggtttccagcatccgcgcgcaggcagcccagttgtgatgattttgtgccagtgcctgacgaatagtttcacgctggaacgcttctgtcgcttcacgcaggttttgcttaacaacgggcaccgccgccacttctggcgtcggcaacgtcacctcaggaaaagcaaaatgttgcgcctcaagaatcacttcatcgccgctgcgggtggctctcgccagaactaccgcccgatgaatagcatgttccagttcgcgcacgtttcccggaaaactgtagtgttgcagtaaatttcgcgctccggcacttaataccacgcgggagagcccctgccgcaaacgacactgctcgcagaaataccccgccagcagaatgacatcatcgccccgctcacgcagcggcggcaccgaaagtggaaacacgctcaggcgatgaaacaaatcggcgcggaatcgccctgccagcacctcttcgcgtaaatcgcggttagtcgccgccagtcacgcgcacatcgacccgcaaacaacggtcatcgccaacgcgctgaatatcgccatactgcaacaccctcagcagcttggcctgcaatgccaacgacaactcgccgatctcatccagaaacagcgtgccgttatccgccatttcaaacttcccgctgcgattactgatagcgccagtaaacgctcctttcacatgcccgaacaactcactttccgccacactttccggcagtgcagcacagttgagatagaccagcggattcaccgcccgtggcgaggcttcatgaatcgctttcgccaccagctccttaccggttccagtctcaccgctgatcaggacgttgagatcggacgccgccacaatctcaatctcttttttcagttgcgtcatgccaggggacaagccaatcatctgcgtctgtttcaccgcttcaaacggcgtggcatcgcctggcagcatattctggctttccagttgttcaatcagcaacgcattgcttaacgctcccgccgccagcgcagcaatcagccgtagctcttcgtcgctgaaaacatcgaactgatcgggctgcatcccgtcgagcgtcagtgcgccgatcaggttttgcccggcaaacaatggcagaccaacgcaggcgtgaaccttcagactctcctgcccaggaatcaaaccgtcatagggatcgggcaattcgctgtctgcgggaaagcgcaccacatccccggcgcgggcaatcgcttccagccgtggatgcccttccagcgcaaagcgtctaccgagtacatcctttgccagaccgtcgatggcaagcggaataaactgccgcgaatcgtaacgtagcaacgcagacgcatcgcactccagcacctgacgtagcgtggtgatcaggcgctgaaaacgatcctggtgaccaatcccacgctgcaattcgatggcgatattcgccagcacatcaacggaaaaactcatctttgcctcactgtcaatttgactatagatattgtcatatcgaccatttgattgatagtcattttgactactcattaatgggcataattttatttatagagtaaaaacaatcagataaaaaactggcacgcaatctgcaattagcaagacatctttttagaacacgctgaataaattgaggttgctatgtctattgtggtgaaaaataacattcattgggttggtcaacgtgactgggaagtgcgtgattttcacggcacggaatataaaacgctgcgcggcagcagctacaatagctacctcatccgcgaagaaaaaaacgtgctgatcgacaccgtcgaccataaattcagccgcgaatttgtgcagaacctgcgtaatgaaatcgatctggcggatatcgattacatcgtgattaaccatgcagaagaggaccacgctggggcgctgaccgaactgatggcacaaattcccgatacgccgatctactgtacagccaacgctatcgactcgataaatggtcatcaccatcatccggagtggaattttaatgtggtgaaaactggcgacacgctggatatcggcaacggcaaacagctcatttttgtcgaaacaccaatgctgcactggccggacagcatgatgacttacctgacaggcgacgcggtgctgttcagtaacgatgctttcggtcaacactactgcgacgagcatctgttcaacgatgaagtggatcagacggagcttttcgagcagtgccagcgttactacgccaatatcctgacgccgttcagccgcctggtaacaccgaaaattaccgagatcctgggctttaacttaccagtcgatatgatagccacttcccacggcgtggtatggcgcgataacccgacgcaaattgtcgagctgtacctgaaatgggcggctgattatcaggaagacagaatcaccattttctacgacaccatgtcgaataacacccgcatgatggctgacgctatcgcccaggggattgcggaaaccgacccacgcgtggcggtgaaaattttcaacgtcgcccgaagcgataaaaacgaaatcctgactaatgtcttccgctcaaaaggcgtgctggtcggcacttcgacgatgaataacgtgatgatgccgaaaatcgccgggctggtggaggagatgactggtttacgcttccgtaacaaacgcgccagtgctttcggctctcacggctggagcggcggtgcggtggatcgtctttccacgcgcctgcaggatgcgggtttcgaaatgtcgcttagcctgaaagcgaaatggcgaccagaccaggacgctctgaagttatgccgtgaacacggtcgcgaaatcgcccgtcagtgggcgctcgcgccgctgccgcagagcacggtgaatacggtagttaaagaagaaacctctgccaccacgacggctgacctcggcccacggatgcagtgcagcgtctgccagtggatttacgatccggcaaaaggcgagccaatgcaggacgttgcgccaggaacgccgtggagtgaagtcccggataacttcctctgcccggaatgctccctcggcaaagacgtctttgaagaactggcatcggaggcaaaatgagtaacggcattgtgatcatcggttcgggcttcgccgcccgccaactggtgaaaaatattcgcaaacaggacgccactattccattaaccctgattgccgccgacagcatggatgagtacaacaaacctgacctcagccatgttatcagtcaggggcaacgtgccgatgaccttacccgccagacggcgggtgaatttgccgagcagtttaatctgcacctgtttccacaaacctgggtgacggatatcgatgccgaagcccgtgtggtgaaaagccagaataatcagtggcaatacgacaagctagtactggcaaccggtgccagtgcctttgtcccgcctgtgcctgggcgtgagttaatgctgacgttaaatagtcagcaagagtatcgcgcctgtgaaacgcaactgcgggatgcccgacgcgtgttgattgttggcggtggtttgattggtagcgaactggcgatggatttttgtcgtgcaggcaaagcggtcacgctaatcgacaacgctgccagtattctggcgtcgttaatgccaccggaagtaagcagccgcttgcagcatcggttgacggagatgggcgttcatctgctgttgaaatctcagttacaggggctggaaaaaacggattctggcattcaggcaacgctggaccgccagcgcaatatcgaagtggatgcggtaattgccgccaccggactgcgcccggaaaccgccctggcacgacgcgccgggctgacgattaatcgcggcgtttgcgtcgatagttatctgcaaaccagtaataccgatatttacgcgctgggcgattgcgcggaaattaacggtcaggtattgccgttcctccagccgattcaacttagcgcgatggtgctggcaaaaaatcttctcggcaataacacgccgctgaaactcccggcgatgctggtgaaaatcaaaacgccggaattaccgctgcatctggcaggcgaaacccagcgtcaggatttacgctggcaaattaataccgaacgccagggaatggtggcgcgcggcgttgacgatgctgaccagcttcgcgcctttgtggtcagtgaggatcggatgaaagaggcatttggattgttgaaaacattgccgatgtaggtgggctactgtgcctaaaatgtcggatgcgacgctggcgcgtcttatccgacctacggggacgcatgtgtaggccggataaggcgtttacgccgcatccggcaatggtgtccaaatgcaacacgttttatccgttctggacttcacccgctaaccaacgcgccgcagcaataaccccctgccccagagacaaaccgccatcacccgccggtaaactctgtggaaagagcaatgtgaaatcagcgagataatgcgccagacgtgcacgcagcaaacggttatgaataaccccgccgctaaataccagcgtagtgataccacgcatcgtggcctgctcacgcatcaacgcggcaaaaccctgcgccagcgcatcatgaaacgcccacgcgcgttgattaaccggtgcctgccagttcagccactgctgccagaaagtggcgagatccagttgattgtccacccgcggcattgtcaccggatgcgtcactccgtggcatgaggctgcgagcgcctccagagcacaagccgcttcaccttcataacttaacgtggctggcgcacagcccagtgccgccgccactgcatcgaaaaaacgcccacacgatgacgccagcggcgcgttaattccacgctcaatggcccgcgccagcacgctccagttttggtgttgcacacttgctgtttcagagtaattctgccactccggcacaaagcgcaggcactgcgccagcaggtttcgccacggctgcttcgctgccaaatcgccacccggaagcgccactgcaggcaagccgcccaggtgctcacattcgcgatagttcacccgcaggcactcgccgccccacaaagcgccgttctcccccataccgataccgtcgagcgtcaaagcaatgacatcaccgccatccagcggccactgatgctctgccagacacgccgctgcatgggcatgatgatgcagtaccgtttgcgtcggcagattcatttcacgcgcccactggctggagacatagcccggatgcgcgtcatgcacaacgtattgcggggtaaaatcgtagatgttttgcatcaggcgtaacgcttcgcgccactgcatctggatgccatcgtcacttaaatcgcccagatgctgactcaacaccgcttgttcaccgcgcaccaggcagaaggtatttttcagatccgcgccgagacacagcacaggcggaacatttttaaagcccggaggcaaagccagcgcatccggcacatacccccgcgaacggcgcagcatttcgccgctttcgcgcaccaccgaatcatccatccgctgcacgatgtcgcggttatgtatcaagaatccgtcggcaatgccctgcaaatccgccagcgcctgttcgttgctgatagctggtggtttaccgctcaggttgccggaggtcatcaccagcgggcattgcagttcctgtaacagcaaatgctggagcgggttcgcaggcaacattaccccgacttcgttaaggtcaggggcgatatcatcacaaagctcaggaacgtattttttatccaccagcacaatcggcgcggcgggcgtggtaagcaactggcgcgcagcgtctggtaaaccgtcagccactggcaacatgaccgccagcggtttcgccgggcgatgtttgcgcgcccgaagtgtcgccaccgcgttactgttacgtgcatcgcaggcaagatgaaatccgccaatccctttgatggcgacaattttgcccatttttaactgtgcgatagctgcctgtaatgccgcctcttgttccgcatgttcaccatgacttacccattcaagatgcgggccacactccgggcaggccaccggctgggcgtggaagcgacgatcgagcgggtcacggtactctttgtcacaggccggacatagcggaaacgccgccatcacggtaaacgggcggtcgtaaggcatggcgcgaataatggtgaaacgcgggccgcagtgggtacagttgataaacggataacgataacgccgttcgcctggggtattcatttcggcaaggcaagcagggcaagtagcggcatcgggaacaatttgcgtattcatggtgccgcctgtgctctggcgtatagtgaactcggtgggcagttgtgaccagataaacggctcacgctcgacgctatcaatacgcgccagcggcgggcagtgctgatacaattgaacaagaaacgtttccgggtcttcccgcagccggacttctacgccatcgccgtcattacagacatcgccgtgaagatttaattgctgtgccagctgccagacaaacggacgaaaaccgacgccctgcactttgccacgaatacgcagttggacaccgcaagatgtgttttttgccattgagttattcccgccatcatgaattgcgtaacccgccctgccggacacgacagcgtcgcatccggcagtcacaggtcggcgataccgcccgctccgtattctacgaatatttccgggaattcctttgatgccagaacagttctgtaagatttttagaacatcagcgccgtacggcggcgtttttctgcgctcagttgttcaagtttattacgatcgacacaaatcagcgcatgagtcgggcaagccgccatacacgccgggccgtcttcacgatggttgcacaggtcgcatttattggcttcggctttgtcagcccgtacattcagacccgcgccgctgttgcggatcaccggacgtaccaccacttccatcgcaccatacgggcaagccacaacgcaggttttgcaaccaatgcaacgttcctgcatcacatgaacaaaccctttatcacggctgatagcaccattcgggcagacgttagcgcacggtgcatcttcacactgacggcaaactgtcgccgtggaaatgttcacacctttaatgacatggatacgcggtaaaaaagtttccggggtcagcgatgcacagtcctgattttcctgatgagaaaccacgcacgctacttcacaggtacggcaaccaatacatttactcgcgtcagcaatgatgaaacggttcatcaaattctccagcaatgacagttaatgcgccgatacattcacaaatcatgccagtttttaatttactgttatttaaggaaattaatttctgtaatgcaggaaaaacgatgtcatcgacactagtgacgatgacatgtgatgacaatgtttatcgcgaaggagcaatgagtgagtcgcggcggatcagttttccgctgaaggttttcggcggtgagaaatccccgccatcgagcataaaaatcagccgtccaataatttcctgaatcatctcagtcaccggaatttttacgctggagagcgccggaacggtgtagggggcaatagcgatatcatcgaatccgataactgacacctgctctggcaccgctacgccgcgctcgtgtaacgctttcatcgcacctatcgccatatcgtcgttactggcaactaacgcgctaaatttagccccacgttcgagcaacatttctaccccttcggccccgctggcaggcgtccatttaccgttagcgataagtttttcattgagcgcaataccatgctgcgccagcgcgtctttatacccggcaagacgttcaatgctggtgggggaatccatcgagccggtaaggaaagcaatctcctgatgcccggcgtttatcaactctgccacggcgttaaaactggtctgtttatgatcgcaccagacgctatggctgctgtttttgcgcaggcggcgattaagcaccattatcggctgactgtgcgcgtcaatgatgtcatcgatctcatccacgcttaaaaaacgcgggtaaatcatgatcgcgtcgcagcgcagatccagcagatactgaatcgcctggcgctcttcttctgcgctgtgtttaccatctgccaatagcaactgccgccctttctcttccgccattcgcgcggcatgaaagagtaattcactaaaataaatgccgtggtaaagcgtgttggtcactaccagccccagcgtctgagtactcttcgccgacagattgcgcgccagcaagtttggacggtaaccgctctcttctaccgcctgaaacacgcgatctttagtctcctggctgacgtagccattacctgaaagcacgcgggaaacggtcgcttttgaaaccccggcgcgcttcgccacttccagcatcgtcgtcatcattttcatccctttacacgcaatcaacgcagtgtactgcaccgtttgccgattgtccttgcacaatcggcgggaaaaatattcaggtgaccggtttcacaaatataaaaaatgaacaattcactctcttgcttatttagtgacaactattcatgattttgtgaaaccggtttcttaattccgtttcagcatcggcatttttccgtcacgtcgactgataacaactacatctaccctactgataacaggataaaatccgatggccaaaaattatgcggcgctggcacgctcggtgatagcggcactgggcggcgttgataacatctcggcggtcacgcactgtatgacgcggttgcgctttgttatcaaagatgatgcacttatcgacagcccgacgttaaaaaccatccccggcgtgctcggcgtggtacgtagtgacaaccagtgtcaggtgattatcggcaataccgtttcacaagcctttcaggaagtcgtcagcctgctgccgggagatatgcagcccgcacagcccgtgggtaaacccaaactcacgctacgtcgcattggtgcggggatcctcgatgcgctgatcggcaccatgtcaccgctgatcccggcgattatcggcggatcgatggtcaaactgctggcaatgatcctcgagatgagcggcgtgctgacaaaaggatcgccgaccttaaccattctgaatgtgattggtgacggtgctttcttcttcctgccgctgatggtcgcgcatctgccgcgcatcaaatttaaaaccaatatgtcgctggcgattgccatcgcgggtgtgctggtacatccgagttttattgaactgatggcgaaagcggcccagggtgaacatgtcgaatttgccctgattccggtcaccgcggtgaaatacacctacacggtgatcccggcgctggtgatgacctggtgcctgtcatatatcgaacgctgggtggacagcattacaccggcggtgaccaaaaacttcctcaaaccaatgctgattgtgttgattgccgcaccgctggcaatcctgctgattggcccgattggtatctggatcggtagcgccatttcggcgctggtttacaccattcatggttatctgggctggctttcagtcgccattatgggcgcgctgtggcctctgctggtaatgaccgggatgcaccgcgtctttacgccaaccatcattcagaccattgccgaaaccggcaaagaagggatggtcatgccgtcagagatcggcgctaacctgtcgctgggcggttcatcactggcagtggcgtggaaaacgaaaaacccggaactgcgtcagacggcgctggctgcggcggcatcagccattatggcggggatttccgaaccggcgttatatggcgtggcgatccgcctgaaacgtccgcttatcgccagtcttatcagcggttttatttgcggcgcggttgccggtatggcggggcttgccagccactcaatggcagcgccggggctatttaccagcgtgcagttcttcgatccggcgaatccaatgagcatcgtctgggtgttcgcggtcatggcgctggcggtggtgctgtcgtttatcctcacactgttgctcggctttgaggatattcctgttgaggaagcggctgcccaggcgcgaaagtatcagagcgtacaaccgaccgtcgccaaagaagtaagtcttaattgaggatgaaaatgtcagtatttccagaaagttttttatggggcggcgcgcttgccgccaaccagtctgaaggtgcgttccgtgaaggtgacaaaggtctgaccactgtcgatatgatcccacacggcgagcatcgaatggcggtgaaactggggctggaaaaacgttttcagttgcgagatgacgagttttatcccagccatgaggcgacggatttttatcatcgttataaagaagatatcgccctgatggcagagatgggattcaaggttttccgtacctcaattgcctggagccgtctctttccgcagggcgatgaaatcacgcccaatcagcagggcattgctttttatcgttctgtctttgaagagtgtaaaaagtacggtatcgaaccgctggtcacgttgtgccacttcgatgtgccgatgcatctggtcaccgaatatggctcctggcgtaaccgcaagctggtggagtttttcagccgctacgccagaacctgctttgaagcatttgatggtctggtgaaatactggctaaccttcaatgaaatcaacattatgttgcatagcccgttctccggcgcgggtctggtgtttgaagaaggtgaaaatcaggatcaggtgaaatatcaggccgcgcatcaccagctggttgccagtgcgctagccaccaaaatcgcccatgaggttaacccgcaaaatcaggtgggctgtatgctggcgggcggtaacttctacccttacagttgcaagccggaagatgtctgggcggcgctggagaaagaccgggaaaacctgttttttatcgatgtgcaggcgcggggcacgtatccggcttactctgcccgcgtattccgcgaaaaaggggtaaccatcaacaaagcaccgggcgatgatgaaatcctgaaaaacaccgtcgattttgtctctttcagctattacgcctcgcgctgcgcctcggcggagatgaacgccaacaacagcagtgcggcgaacgtggtgaaatcgctgcgtaatccgtatctacaggtgagcgactggggctggggaattgatccactcggtctgcgtatcaccatgaatatgatgtacgatcgttatcagaagccgctgtttctggtggaaaacggcctgggcgcaaaagatgaatttgctgccaatggcgagattaacgacgactatcgcatcagctacttacgcgaacatatccgcgcaatgggcgaagcgattgcagacggcattccgctgatgggctacaccacatggggctgtattgatttagtttccgcctctacgggtgaaatgagcaaacgctacggctttgtctttgttgaccgtgacgacgcaggcaacggtacgctgacgcgcacgcgtaagaaatcattctggtggtataaaaaagtgattgccagtaatggggaagatttagagtaggtaacagtgccggatgcggcgtgaacgccttatccggcctacatgtcgcacgaaccatgaaggcccgataagcgcagcgcatcgggcaatttagcatttggcatcagagctggttcaccccatcaagaacatccctgtcctgattccttaatgaaaaactactcttcttccaccgctaactgcgcgaagccgccatttccttcccagccttccagtcgttgataaacggtttctaccgcatctttaatcggctgggtcatcgggtagtaaaagccgacgatatccggctgaatgccgaggaaaatcacttcgccaatatcttctttcaactggtcgataaggtaattcaacggcatgttatgggtagtcatcataaacatctcggcgatatcatccgggtcgatgatgcggatctcgccggggtttagccccatatccgtggcgtcgacaatcagcagtcgtgtcgggcgcagttcacggatagcgacgatgtcgttttccggtgcgctaccgccgtcaatcaccacccagttacctttcggcgcggcggcgcacttttccgccagcagcggacctgcgccatcatcgcccatcatgctattgccaacacagagtaaaacgtcagtcacgcagtctcctcaccatcaaatagatggcgttttcctgatgaatatcatgcagcatacttaacagcattgtactccattcctgctgctgcgaagtttgcgctgcccgggctttatcgaatgcgttggccagcatcggcacatggttaatgtcgatgacgatctcaccatatttcggcacgccttccattttgcggcgggcttcactgcctgcctccagagtggcaatccatgccagatattcatcccacgggcaggtgagcgccgcttccaggcaatcgataaccccaaggtggtgaccaatcgccaggctgtaatagaccacctgctgcgcctcggcgggcgtggcatcgttctcatcaataaatttacggctcagttgactgaacaccaccttttcactcatcggatacgcgcctcttcaacaacatgattcagatggctgacaatctcgttcagacgcggatcgttttccgcttccagccagcgtgcaacctgttcttcgccctgccctaactgtgtaaggtaatcatcggcaatctgacgaccgtaacgataacccgccaggcgacgtgcttcgcgatccactttcacgcgcagcggctgcaccatatcaccatgcaggatctccgccggttgttcatccagttcacccggcccacgggcgtgaattttctgctccagcaggccgagcgccattgcaaagccgtacagcgtggcggcaggcgttggcgggcagccagggatataaacatccacagggacaattttatccgtaccgccccacacgcagtagagatcgtggaagatcccgccactgttaccgcaggcaccgtaggagatacaaattttcgggtccggcgcggactgccacgcacgcagcgcaggggatcgcattgcacgggtgaccgcgccggtaaacagtaaaatatccgcatgacgcggtgaaggaacgactttaatgccgaagcgttctgcatcaaacagcggcgaaagcgtggcgaaaatttcgatttcgcaaccgttgcagccgccgcagtccacgcggtaaacataggcagaacgtttgatttttttcagtaacgacgccttcatgctggcgatggattcatccaccgtcatggggaccggaatgccgttggcgtcacgggggcctaataaattgctcatcagatggcctctttcatatggcgagtcagttcaatacggtcggacggcaccaggcatttctggcgcttacattccgggcaagtctcaaagctttcgcggtggttttccgcgcggctgtcgccgttgtgcttaagcagcgcaatggcgtagtcgatctctttctggacggcgaaaggacgattgcagacgcggcagttgcacagcgcgaagcgggactgttgcaggaagtcttctttcttccacaccgccagttcgtactcttgcgacagtttgatcgccgccgtcgggcagacttcttcgcagcgtccacagaagatgcagtgcccaagattaaactcccaggcaagctctcctgtggcgaggtcagtttcaaccgttaaggcgtttgacgggcaggcattgacgcaggccgcgcagccgatgcactgctgcgggttctgctctggcttaccacggaagtttttatcaaccgcaatcggctccagcggataagacgaggtcgccgtgccggttttgatgacttttttgataaaggtaaacatggcgattccttatttcagcggcgagtttttacgctcaatgctgtaacgctcgagttctttgtacggcaccactttgctcttcttcttacgcacatcgaccacggtcatgcggtcggtacaggagtagcaagggtcgaggctaccgataatcagcggcgcatcggaaacggtgttgccgcgcagcatgtagcgcagggtcggccagttcgcgtaggtcgcggcacggcagcgccagcggtacagcttctggttgtcgccggtcatgctccagtggatatcatcgccgcgcggcgcttcggcaaagcccagcgcaaagcggtgcggaatgtaggtaaagccttccaccatcagtgggccacccggcaggttatccagaccgtagtcgatcatgttcagcgcggtatagacttcgttgatacgcactttcagacgggaaataacgtcgcagccctgctcgctgtggacttccattggcagcaggccatagccgacaaacgggtgatcggcgcgggtatcacgggcgtgaccgctggcacggaccatcgggccgacgttactgaagtcgcgagcgatttccgggtccagacgaccaatgccgacagtgcgctgttccatgttcggagtgctcagcagcacatccaccagctcctgcacttcacgacgcatctgttgtgccagctggcgggtctggatcatgtcgtctttcagcagatcgcgacgaatcccgccgatcaagttcaggccgtaggttttacgcgcaccggtaaggatctctgccattttcatggaggtttcacgcacgcggaagaactgcataaagccggagtcgaagccggtaaagtgacaggccaggccaaggttgagcagatgcgagtgcaagcgttctacctccagcagaatggcgcggatcatctgcgcacgttctggcacctgaatacccatcgcgttttccaccgacgtggtgtaggcggtgctgtgggcaaagccgcagatcccgcacacacggtcagagaggaaggtcacttcgttataacccatacgggtttccgccagtttttccatgccgcgatggacgtagaacagacggtagtcggcgtcgataatgttttcgccatcgacgaacagacggaagtggcccggttcatcagaagtgacgtgcagcggaccaatcggcacgacgttgtttttcttgtcgcccagttcgttgatgaactcgtaggtttcagcatcggtggtcggtgccggacgctgacgataatccatgctgtctttacgcagcggataaagttcatccggccagtcatccggcagcaccagacgacgttcatccggcagaccaaccggaatcaaaccgtacatatcgcgcacttcacgctcgccccacaccgccgccggaacgcgcggcgtcacggacggatattccggtttgttggcgtcaacttcgacgcgaaccgtaatccaacacttagtgcccttctccatcgacagcacgtagtaaacggcgtaatgaccattcagtttgcgttcgtcgttaccaaacagcaccgacagccagccaccctgtttgtagtaaagaaactccaccacttccggcaggtagttcacctttacggtgacagtcagctgatctttggtctgccaggcgtggtccagcacgacgcccggaaatgcctcattcagcgcggcgagataatgttgacctaatttttcttcagacatgctcaaactctctttaatcacgccgccagcaaggagacgaacgctaaaaatgcaaagccaaacccagcccaggtaatgcgcggagtaatatcaagacgcagacgggccatgctgttttcgaacagcgcgataaccaggacgccgaccaccagttttacgatggcaatcaccagcgccagcagcagtccaccggcggtgaaggtttccatttgtccccacggaataaacaccccgacgaacatctgcaacaccaccagctgtttcaggctgataccccatttcatgacgccaaagccgctgccgctgtattcagagagcgggccttcctgcagctcctgctcggcttccgccaggtcgaacggcagtttgcccatttcgataaaggtggcgaacgcacaggcacaaagcgccagtaccagcgggatgctctggctcagcggccagtgataaacggtgtcggtgatgttgctgatgttggtggaaccggcaacctgtgcggcaacccacagaccaagcagcagcatcggttcgaccagcacgccaagcatcgcttcacggctcgcgccgatagcggtaaacgggctaccggtatccagaccagaaatggcaaagaagaaacgcgcgatggcaaagagatacagtaaggtgatcaaatcacccagttgcggcagcggagaaccgacggtcaccaccggcagcgcagtagcgatagtcagcatgacgcccaccatcacatacggcgtcaggcggaacacccagccggaggcatccgggccgacgctctgacgccccagcagtttgataatgtcgcgatactcctgcaacacgcccggcccgcgacggttatgcaagcgggcgcgcgccacgcgggttataccggagagcagcggcgcaacggcaaataacaccagcgcctgaattaacggatataaaacactcattctcaggctcctcgtgaaacaataatcaccaccagtaccgccagttcaaccagcgccatccggcggaacagcaacgcactcccctcgcactgccagcccggcaccagagacaccggattcagccatttgcgtagtttcagcaccggcgcaaacgcctgtttcaccggcatggcaaaaccgtgagcggtaatcaccattgatttttcgtggtcgtaaccgcacacccaggccgcaccgcgggaacgcgatggcaaacgatcgcctttgcaaatcgccataatgatgaatggcagcagcgggcaggcaatcagcagcaacgtgatcatcggttgagaaacggtggtgttagcaggctccagcggcagaggtacagcagcagagagcatcggcagtagccacggcgcagcaacaccgccaattacgcagcaaatcgccagtgccactacgcttacgctcatcaggagcggcgcacaggtggcgttttcggcttctttggtgcgcggcgcgccgaggaacgtgacgccatagactttcgccatacacatcaccgccagcgcaccggtaattgccagccccacagcgagcagcggccccagcagacgggcaacaaacgcgccactattgctcagtttgaaaaatgattgatagataacccattccccggcaaaaccattcagcggcggcagcgcagccattgccatcagcccgactaacatggcgatggagataaccggcattttcttgccaataccaccgagtttttcgatatcgcgatgaccggtacggaaccagacgctccccgccccgaggaacagtacgcttttgaacaggctatggttaagcagatggtacagaccaccgaccaggccaagagcaatcagcgccggttgttcgagcgcgatacccgttacgccagcgcccagccccagcaggatgatgccgatattttccagggtgtggtaagccagcaggcgctggatgttgtgctccaccagcgcatacagaccaccgacaaacgcggtgatcatgccgagcaccagcagcgcgatcccccaccacagcggtgcattaccgcccagcagtgacagggttaaaatgcccagcaggccaattttcatgactaccgtagaaaacaacgcggcagctggcgcagaggcgttcgcatgtgcctgcggcacccagccgtgcagcggaataatcccggccagcaggccaaagccaatcactccgagcagccagatatcggaaccgagcggcagctgttgcatacgcatatccagcaggcgcagatccagcgtgccgtaacgctgccacagcagccagcaagcaatcgccagcagcagagtgccaagacgccccagcgcaaaccacagtttgccctctttgctgttgctggtgaggaacaccgcgcacagggccatgatttcggccattaccacgaacatgccgaggttgctggcaatgacggcgcagacggcggcagccatcaacatattgatctgcaagccgttgcacttcacctgcgcgtggcgatgccagtcaatgttgtagaggctgacaaacagaccgcacagaccgagcgtaatcagccaaatcgcgttaagcggagagatttgcacatcgtagcttaccagcgacagcgcaccgctcacgccaaccgcgccagtcagtacagtgaagcccgcggctgccgtatacagactaccaaccgcgccgccaattccagctatccagccacttaacgctttttgaaaagaaaagagaaatgccagaacagcggcggcgacaaaccacgccacgccgctattgatcagggaaattgcgctcatttagcctctccactttgagcctgctgaaacaaggtgagatcgccaaagtccgtgttaaaggtcagctcacgcttacgtttgctgacgcgggcgatatcggtgttatccaccagatgcagggctttagtcgggcacatccgcacgcaggccggaccttgttcatcaaagctacaaaggtcacatttgacggcgatcgcgcgaatacctggcacccagtcaagcaatgtgctgacacgcgccggagcaggcggtgccggtggcgctttcggggtattggcgtttgccggaatatccagcggacggctgccggaaaattcaattgcgccaaacgggcaggcgatgccgcacagcttgcagcttacgcacaggctttcattcaactgcacggccccatcgacgcgggtgatggcgttaaccgggcagaccaccgcgcagggtgcatcttcacagtggtgacagagctgcggcgcagattctttttcattcagcatcactctcaggcgcggcattgattgcaggccgtgctggcgatgcgtctctgaacaggcggcctcacaagtgtggcagccgatacagagcgtggagtcagcaattacaaaacgattcaccaggcattcctcaggtgattgtcatttttgacgaaaacatgccgatgaaatgtcattttcgacactcatcgacacgcccatccccaaacaggcgtaacgcctgcaaaacgggcaaagcctcagctcatgctgccgggctttgtccctttaccagttggcttaaattcaccggcacattgttttcaatagcggtgtataagctgtcgtaaacgccagcgattttttcgagatagtgttccagaacctgttcgcgatcgcggatgttgaccttgccatcaatcatgccgtcaatgctcagttgcgcctgcgcaatccgctgtttgtcttcgccatcttttgtttcgacgtaatactcgatggtgtggctgttaaagccatccgccagggtgacgtaaatgcgaaaatgttcaaaaaggacgaaacagagttctttgtccggcgcgcagctcatggcgtgatgcaggcgcgctttcgataacgtgatcccctgaaccagcgaattgcagtagatgtgccactggtcctgtaggcgacgatgccgctgtgcgatgtaatcggctttctcgcttatttcccaaatagtcattgtcaggttacccgtttaacagagatgccagctttaagcattttttgtgccaacttttaatttattgttattaaagagatttttaagctaaagatgaatttcgtcgccgtgtcgacgtgtcatttcgacatcatcgacattattcaccgcagggataatcaacactggcacaattattgcttgtagctggcaatagttaatgggaggcgatatgcacgaaataaccctctgccaacgggcactggaattgatcgaacagcaggccgcaaaacacggcgcaaaacgcgtaactggggtctggctcaaaattggcgcattttcttgtgtcgaaaccagctctcttgccttttgttttgatctggtttgccgcggcagcgtggcggaaggttgtaaactgcacctcgaagaacaagaggccgaatgctggtgtgaaacatgccaacagtatgtgacgctactgacccagcgcgtccgccgctgtccacagtgtcatggtgacatgctgcagattgtggcagacgacggtttacagattcggcggatagaaatagaccaggagtgagcgatgtgtacaacatgcggttgcggtgaaggcaacctgtatatcgagggtgatgaacataaccctcattccgcgtttcgtagcgcgccatttgccccggcggcacgcccgaagatgaaaatcaccggcattaaagcgcctgaatttacccccagccagactgaagaaggcgacctgcattacggtcatggcgaagcgggcactcacgcaccgggcatgagccagcgtcggatgctggaagtcgaaattgacgtgctggacaaaaataaccgtctggctgaacgcaaccgcgcgcgctttgctgcccgcaagcaactggtgctcaacctggtttccagccctggttccggtaaaaccaccctgctgacggaaaccctaatgcgcctgaaagacagcgttccgtgcgcagttattgaaggcgaccagcaaaccgtgaacgatgccgcacgcattcgcgctaccggcacaccagcgattcaggtgaacaccggtaaaggctgccatcttgacgcacagatgattgccgacgccgcaccgcgtctgccactggacgataacggtattctgtttatcgaaaacgttggcaacctcgtatgcccggccagcttcgatctcggtgaaaaacacaaagtggcggtgctttccgttaccgaaggtgaagacaaaccactgaaatatccgcatatgtttgccgccgcctcgctgatgctgctcaacaaagttgacctgttgccgtatctcaactttgacgttgaaaagtgcatcgcctgcgcccgcgaagtcaatccagaaattgaaatcatccttatttccgccaccagcggcgaagggatggaccagtggctgaactggctggagacacagcgatgtgcataggcgttcccggccagatccgcaccattgacggcaaccaggcgaaagtcgacgtctgcggcattcagcgcgatgtcgatttaacgttagtcggcagctgcgatgaaaacggtcagccgcgcgtgggccagtgggtactggtacacgttggctttgccatgagcgtaattaatgaagccgaagcacgcgacactctcgacgccttacaaaacatgtttgacgttgagccggatgtcggcgcgctgttgtatggcgaggaaaaataatgcgttttgttgatgaatatcgcgcgccggaacaggtgatgcagttaattgagcatctgcgcgaacgtgcttcacatctctcttacaccgccgaacgccctctgcggattatggaagtgtgtggcggtcatacccacgctatctttaaattcggcctcgaccagttactgccggaaaacgttgagtttatccacggtccggggtgcccggtgtgcgtactgccgatgggtagaatcgacacctgcgtggagattgccagccatccggaagtcatcttctgtacctttggcgacgccatgcgcgtgccggggaaacagggatcgctgttgcaggcaaaagcacgcggtgccgatgtgcgcatcgtttactcgccgatggatgcgttgaaactggcgcaggagaatccaacccgcaaagtggtgttcttcggcttaggttttgaaaccactatgccgaccaccgctatcactctgcaacaggcgaaagcgcgtgatgtgcagaatttttacttcttctgccagcacattacgcttatcccgacgttgcgcagtttgctggaacagccggataacggtatcgatgcgttcctcgcgccgggtcacgtcagtatggttatcggcaccgacgcctataattttatcgccagcgattttcatcgtccgctggtggttgctggattcgaaccccttgatctactacaaggcgtggtcatgctggtgcagcagaaaatagcggcccacagcaaggtagagaatcagtatcgtcgagtggtaccggatgccggtaacctgctggcgcaacaggcgattgccgatgtgttctgtgtcaacggcgacagcgaatggcgcggcttaggcgtgattgaatcttctggcgtgcacctgacgccggattatcaacgattcgatgccgaagcacatttccgcccggcaccgcagcaggtctgcgatgacccgcgcgcgcgttgtggtgaggtattaacgggcaaatgtaagccgcatcaatgcccgctgtttggtaacacctgtaatcctcaaaccgcgtttggtgcgctgatggtttcctccgaaggagcgtgcgccgcgtggtatcagtatcgtcagcaggagagtgaagcgtgaataatatccaactcgcccacggtagcggcggccaggcgatgcagcaattaatcaacagcctgtttatggaagcctttgccaacccgtggctggcagagcaggaagatcaggcacgtcttgatctggcgcagctggtagcggaaggcgaccgtctggcgttctccaccgacagttacgttattgacccgctgttcttccctggcggtaatatcggcaagctggcgatttgcggcacagccaatgacgttgcggtcagtggcgctattccgcgctatctctcctgtggctttatcctcgaagaaggattgccgatggagacactgaaagccgtagtgaccagcatggcagaaaccgcccgcgcggcaggcattgccatcgttactggcgatactaaagtggtgcagcgcggcgcggtagataaactgtttatcaacaccgctggcatgggcgcaattccggcgaatattcactggggcgcacagacgctaaccgcaggcgatgtattgctggtgagcggtacactcggcgaccacggggcgactatccttaacctgcgtgagcagctggggctggatggcgaactggtcagcgactgcgcggtgctgacgccgcttattcagacgctgcgtgacattcccggcgtgaaagcgctgcgtgatgccacccgtggtggtgtaaacgcggtggttcatgagttcgcggcagcctgcggttgtggtattgaactttcagaagcggcactgcctgttaaacctgccgtgcgtggcgtttgcgaattgctgggactggacgccctgaactttgccaacgaaggcaaactagtaatagctgttgaacgcaacgcggcagagcaagtgctggcagcgttacattcccatccactggggaaagacgcggcgctgattggtgaagtggtggaacgtaaaggtgttcgtcttgccggtctgtatggcgtgaaacgaaccctcgatttaccacacgccgaaccgcttccgcgtatatgctaataaaattctaaatctcctatagttagtcaatgaccttttgcaccgctttgcggtgctttcctggaagaacaaaatgtcatatacaccgatgagtgatctcggacaacaagggttgttcgacatcactcggacactattgcagcagcccgatctggcctcgctgtgtgaggctctttcgcaactggtaaagcgttctgcgctcgccgacaacgcggctattgtgttgtggcaagcgcagactcaacgtgcgtcttattacgcgtcgcgtgaaaaagacacccccattaaatatgaagacgaaactgttctggcacacggtccggtacgcagcattttgtcgcgccctgatacgctgcattgcagttacgaagaattttgtgaaacctggccgcagctggacgcaggtgggctatacccaaaatttggtcactattgcctgatgccactggcggcggaagggcatatttttggtggctgtgaatttattcgttatgacgatcgcccctggagcgaaaaagagttcaatcgtctgcaaacatttacgcagatcgtttctgtcgtcaccgaacaaatccagagccgcgtcgttaacaatgtcgactatgagttgttatgccgggaacgcgataacttccgcatcctggtcgccatcaccaacgcggtgctttcccgcctggatatggacgaactggtcagcgaagtcgccaaagaaatccattactatttcgacattgacgatatcagtatcgtcttacgcagccaccgtaaaaacaaactcaacatctactccactcactatcttgataaacagcatcccgcccacgaacagagcgaagtcgatgaagccggaaccctcaccgaacgcgtgttcaaaagtaaagagatgctgctgatcaatctccacgagcgggacgatttagccccctatgaacgcatgttgttcgacacctggggcaaccagattcaaaccttgtgcctgttaccgctgatgtctggcgacaccatgctgggcgtgctgaaactggcgcaatgcgaagagaaagtgtttaccactaccaatctgaatttactgcgccagattgccgaacgtgtggcaatcgctgtcgataacgccctcgcctatcaggaaatccatcgtctgaaagaacggctggttgatgaaaacctcgccctgaccgagcagctcaacaatgttgatagtgaatttggcgagattattggccgcagcgaagccatgtacagcgtgcttaaacaagttgaaatggtggcgcaaagtgacagtaccgtgctgatcctcggtgaaactggcacgggtaaagagctgattgcccgtgcgatccataatctcagtgggcgtaataatcgccgcatggtcaaaatgaactgcgcggcgatgcctgccggattgctggaaagcgatctgtttggtcatgagcgtggggcttttaccggtgccagcgcccagcgtatcggtcgttttgaactggcggataaaagctccctgttcctcgacgaagtgggcgatatgccactggagttacagccgaagttgctgcgtgtattgcaggaacaggagtttgaacgtctcggcagcaacaaaatcattcagacggacgtgcgtctaatcgccgcgactaaccgcgatctgaaaaaaatggtcgccgaccgtgagttccgtagcgatctctattaccgcctgaacgtattcccgattcacctgccgccactacgcgagcgtccggaagatattccgctgctggcgaaagcctttaccttcaaaattgcccgtcgtctggggcgcaatatcgacagcattcctgccgagacgctgcgcaccttgagcaacatggagtggccgggtaacgtacgcgaactggaaaacgtcattgagcgcgcggtattgctaacacgcggtaacgtgctgcagctgtcattgccagatattgttttaccggaacctgaaacgccgcctgccgcaacggttgtcgccctggagggcgaagatgaatatcagttgattgtgcgcgtgctgaaagaaaccaacggcgtggttgccgggcctaaaggcgctgcgcaacgtctggggctgaaacgcacgaccctgctgtcacggatgaagcggctgggaattgataaatcggcattgatttaactgcaaattgccggacagatctgcctgtccggcatactattcatgaggttttttcggacgatatttttccggcagttctggcaccggacgcttgtcatcgatgagatgacgcacggttaagatcggatgacgccacagcattctcggcccggcccaacgcataatctgtttcatctcttcacgctttgcaggctggtaacagtgcaccggacactgcttacaggctggtttctcttcgccgaacacacatttatccagccgcttttgcgcgtaaacaaacaacgcctcgtaatgctccggctccgctgacgcctgcgggcatttcgcttgataaagatcgatcatttttttaatcgtcagtttttcacgagagatacgcttgccggacatgctgcctccacctcattaagatgtatttatattacatcttaatcttaaagggcactatgactccaaagaagaagggttagccaaccgatacaattttgcgtacttgcttcataagcatcacgcaaaagctgcaaaacagcatctttcccggaaccagcatcaagaactcgccgttcgcttcttcccctgaaatgattaactccggtatcatgtgcgccttatgtgattacaacgaaaataaaaaccatcacaccccatttaatatcagggaaccggacataaccccatgagtgcaatagaaaatttcgacgcccatacgcccatgatgcagcagtatctcaggctgaaagcccagcatcccgagatcctgctgttttaccggatgggtgatttttatgaactgttttatgacgacgcaaaacgcgcgtcgcaactgctggatatttcactgaccaaacgcggtgcttcggcgggagagccgatcccgatggcggggattccctaccatgcggtggaaaactatctcgccaaactggtgaatcagggagagtccgttgccatctgcgaacaaattggcgatccggcgaccagcaaaggtccggttgagcgcaaagttgtgcgtatcgttacgccaggcaccatcagcgatgaagccctgttgcaggagcgtcaggacaacctgctggcggctatctggcaggacagcaaaggtttcggctacgcgacgctggatatcagttccgggcgttttcgcctgagcgaaccggctgaccgcgaaacgatggcggcagaactgcaacgcactaatcctgcggaactgctgtatgcagaagattttgctgaaatgtcgttaattgaaggccgtcgcggcctgcgccgtcgcccgctgtgggagtttgaaatcgacaccgcgcgccagcagttgaatctgcaatttgggacccgcgatctggtcggttttggcgtcgagaacgcgccgcgcggactttgtgctgccggttgtctgttgcagtatgcgaaagatacccaacgtacgactctgccgcatattcgttccatcaccatggaacgtgagcaggacagcatcattatggatgccgcgacgcgtcgtaatctggaaatcacccagaacctggcgggtggtgcggaaaatacgctggcttctgtgctcgactgcaccgtcacgccgatgggcagccgtatgctgaaacgctggctgcatatgccagtgcgcgatacccgcgtgttgcttgagcgccagcaaactattggcgcattgcaggatttcaccgccgggctacagccggtactgcgtcaggtcggcgacctggaacgtattctggcacgtctggctttacgaactgctcgcccacgcgatctggcccgtatgcgccacgctttccagcaactgccggagctgcgtgcgcagttagaaactgtcgatagtgcaccggtacaggcgctacgtgagaagatgggcgagtttgccgagctgcgcgatctgctggagcgagcaatcatcgacacaccgccggtgctggtacgcgacggtggtgttatcgcatcgggctataacgaagagctggatgagtggcgcgcgctggctgacggcgcgaccgattatctggagcgtctggaagtccgcgagcgtgaacgtaccggcctggacacgctgaaagttggctttaatgcggtgcacggctactacattcaaatcagccgtgggcaaagccatctggcacccatcaactacatgcgtcgccagacgctgaaaaacgccgagcgctacatcattccagagctaaaagagtacgaagataaagttctcacctcaaaaggcaaagcactggcactggaaaaacagctttatgaagagctgttcgacctgctgttgccgcatctggaagcgttgcaacagagcgcgagcgcgctggcggaactcgacgtgctggttaacctggcggaacgggcctataccctgaactacacctgcccgaccttcattgataaaccgggcattcgcattaccgaaggtcgccatccggtagttgaacaagtactgaatgagccatttatcgccaacccgctgaatctgtcgccgcagcgccgcatgttgatcatcaccggtccgaacatgggcggtaaaagtacctatatgcgccagaccgcactgattgcgctgatggcctacatcggcagctatgtaccggcacaaaaagtcgagattggacctatcgatcgcatctttacccgcgtaggcgcggcagatgacctggcgtccgggcgctcaacctttatggtggagatgactgaaaccgccaatattttacataacgccaccgaatacagtctggtgttaatggatgagatcgggcgtggaacgtccacctacgatggtctgtcgctggcgtgggcgtgcgcggaaaatctggcgaataagattaaggcattgacgttatttgctacccactatttcgagctgacccagttaccggagaaaatggaaggcgtcgctaacgtgcatctcgatgcactggagcacggcgacaccattgcctttatgcacagcgtgcaggatggcgcggcgagcaaaagctacggcctggcggttgcagctctggcaggcgtgccaaaagaggttattaagcgcgcacggcaaaagctgcgtgagctggaaagcatttcgccgaacgccgccgctacgcaagtggatggtacgcaaatgtctttgctgtcagtaccagaagaaacttcgcctgcggtcgaagctctggaaaatcttgatccggattcactcaccccgcgtcaggcgctggagtggatttatcgcttgaagagcctggtgtaataacaattcccgatagtcttttgctatcgggaatattaacgacaactgacgaataaaataaaaacaccctgtataataggaaagcttattttacagggtaaaaccatgccatctacacgctatcaaaaaatcaatgcccatcactatcgccatatatgggtcgttggtgatattcatggtgaatatcagttattacaatcccgcttacatcaactctcttttttccccaaaatcgacttacttatttctgtcggcgataatattgatcgtggaccggagagtcttgacgtcctgcgcctgctaaaccaaccctggtttacgtcggttaaaggcaaccacgaagcgatggcgcttgaggcattcgaaactggcgatggcaatatgtggcttgccagcggtggtgactggtttttcgatttaaatgattcagagcaacaagaggcaatagatctgttgctgaaattccatcaccttccacatattattgaaatcactaacgacaacataaaatatgccatcgcacatgcagattatccggggagtgaatatctctttggtaaagaaatagcggagagcgaattactctggcctgttgatcgtgtgcagaaatcgcttaatggcgagttacaacaaataaacggcgctgattattttatatttggacatatgatgtttgataacattcagacgttcgctaaccagatttatattgataccggatcgccgaacagcgggcggctgtcattttataaaataaagtagtctcatgcttcttctgtgaagcatgagtaacccggtgttattgcaggccattattcatttttcgctaccagcaaagagagatcctgcttcaccagcgcgcgactggcactctccggcaaaccgtcgtctgtaataatctgatcaaactcgcttaatggtaacgccagccatgtcgccacctgaccatatttcgtcgcatcacagaccaaaactcgctggcggctggcactggcaatcgcccgtttcaccgtgactttatcttccgctggcgtagaaatcccccgcacactccatgacgatgcagaaataaaagcctgatcaatcatcaggctgcgcagcatggtcgcagcggcttccccgacacaggaacggttttcccgacacactgcaccgccagtgtgaataattgtgcaattactgttgtcgagcaagtagtccgcaataacgaaatcgtttgtgaccacagtcagtgactccatgtgaatcagatgctgtgctatcgctaacgtggtcgttcccgcatccagatagatacaacttcccggctgaacaagacttgccgccagcttgccaatagccgctttttgcgtcattgccagcgcagtttttacctgatgagaaggttcatgcgccacgcgtcccggagactggacgcctccggacaccagcacaacggctccctgctgctccagtttttgtaaatcccgacgaatggtcatatgtgacacattcattctgtccgttagttcagcaatactgacaatgcctttttcagctaccatctcaaggatgatttggcgacgctctacgggtatcaacttttgctccttcctttgtcctgctgacattctacgctatttgcctgcgaaacgtgcgcggcgcaactaacgcttagttcacaataaaataacacacaatgttaatttatgtgaatcagatcaccataccgttatcttccagcgcttatattcacaatatcaaacaaaatatcacttaaattaacaaggagagcagatgaaaacgggatctgagtttcatgtcggtatcgttggcttagggtcaatgggaatgggagcagcactgtcatatgtccgcgcaggtctttctacctggggcgcagacctgaacagcaatgcctgcgctacgttgaaagaggcaggtgcttgcggggtttctgataacgccgcgacgtttgccgaaaaactggacgcactgctggtgctggtggtcaatgcggcccaggttaaacaggtgctgtttggtgaaacaggcgttgcacaacatctgaaacccggtacggcagtaatggtttcttccactatcgctagtgctgatgcgcaagaaattgctaccgctctggctggattcgatctggaaatgctggatgcgccagtttctggtggtgcagtaaaagccgctaacggtgaaatgactgtcatggcctccggtagcgatattgcctttgaacgactggcacccgtgctggaagccgttgccggaaaagtttatcgcataggtgcagaaccgggactaggttcgaccgtaaaaattattcaccagttgttagcgggcgtacatattgctgccggagccgaagcgatggcacttgcagcccgtgcggggatcccgctggatgtgatgtatgacgtcgtgaccaatgccgccggaaattcctggatgttcgaaaaccggatgcgtcatgtggtggatggcgattacaccccgcattcagccgtcgatatttttgttaaggatcttggtctggttgccgatacagccaaagccctgcacttcccgctgccattggcctcaacagcattgaatatgttcaccagcgccagtaacgcgggttacgggaaagaagacgatagcgcagttatcaagattttctctggcatcactctaccgggagcgaaatcatgatcaagattggcgttatcgccgatgattttaccggcgcgacggatatcgccagttttctggtggaaaacggtctaccaacggtacaaattaacggtgttccaacaggtaaaatgccggaagcaatcgacgcactggtgatcagcctgaaaacgcgctcctgtccagtggttgaagccacacagcaatcgctggcggctctgagctggttgcaacagcaaggttgcaaacagatctatttcaaatactgctctactttcgacagtacggcgaaaggtaatattggcccggttaccgatgccttaatggatgctctcgacacgccgtttacggtcttctctccggccctgccggtcaacggacgtacggtttatcaggggtatttgttcgtaatgaatcaactgctggccgaatccgggatgcgccatcacccggtaaatcccatgaccgacagctatcttccccgtctggttgaagcgcaatccacagggcgctgcggcgtcgtttcggcacatgttttcgaacaaggtgtggatgccgttcgtcaagagctggctcgcttacagcaagagggctaccgctacgcggtgcttgatgcgctgaccgaacaccatctggaaattcagggagaagccttgcgcgatgccccactggtaacgggcggttctggtctggcgattggcctggcccggcagtgggcgcaagaaaacggtaaccaggctcgcaaagcagggcgtccgctcgctgggcgcggcgtagtgctctccggttcatgctctcaaatgaccaaccgccaggtagcacattaccgtcaaattgcaccagcccgtgaagttgatgtggcacgctgcctctcaattgaaactctggccgcttatgcacacgaactggcagagtgggttctgggccaggaaagtgtacttgctccactggtttttgccaccgccagcactgacgcattggcagcaattcaacagcaatacggtgcacaaaaagccagtcaggcagtagaaacactgttttctcaactagcggcgcggttagcagcggaaggcgtgacacgctttattgtcgcaggcggtgagacctccggcgtagtcacacagagcctgggaataaaagggtttcatattggcccaaccatttccccggcgtgccgtgggtaaacgcactggataagcctgtctcactcgcccttaaatctggcaacttcggtgatgacgcctttttttcacgagcccaaagagagtttttatcatgagcgatttcgcaaaagtagagcagtctttgcgagaggagatgacgcggattgccagttcattctttcagcgcggctatgcaaccggttcggctggcaatctgtcgctgcttttacctgacgggaatttactggcgacaccgacaggttcatgcctgggcaatctcgatccgcagcggctttccaaagtcgccgcggatggcgaatggttaagtggtgacaaaccctcgaaagaggtgctctttcatctggcgctgtatcgcaacaatccgcgctgtaaagcggtggtgcatttgcacagcacatggtcgacggcgctttcctgcctgcaagggctggacagcagcaacgttattcgtccgttcacaccatacgtggtgatgcggatgggaaatgtcccgctggtgccttattaccgaccgggcgataaacgcatcgcacaggatctggcggaactggcagcagacaatcaggcttttttactggcaaatcatggcccagtggtttgcggtgaaagcctgcaagaagccgccaacaatatggaagagctggaggaaacggcaaagctgatttttattctcggtgaccgcccgatccgttatctgaccgcaggtgaaattgcggaattaaggagttaatgcaatgcctcgttttgcagctaatttatccatgatgttcaccgaagtgccttttattgaacgcttcgccgcagcgcgaaaagccgggttcgatgctgtggaatttctgtttccctataactactccaccctgcaaatccaaaagcaactggagcaaaaccatctgacactggcgctgttcaataccgctcccggagatattaatgcgggggaatggggattatccgcccttcccggacgtgagcacgaagcacacgcagacatcgacctggcactggaatatgcattggcgctcaattgtgaacaagtccatgtgatggcaggcgtcgtgcccgctggcgaagatgctgaacggtaccgggcagtatttatcgataatatccgctacgctgccgaccgctttgcgccacacggcaagcgaatattagttgaagcactcagccccggcgttaagcctcattatctcttctccagccagtatcaggcactggctattgttgaagaggttgcgcgagataacgtgtttattcaactagatacttttcatgcgcaaaaagtagatggcaacctgacgcatttaatccgcgactacgccgggaaatatgcgcacgtacaaattgccggactacctgatcgacatgaaccggacgatggagaaatcaactatccgtggctgttccgcctgttcgatgaggtgggatatcagggctggatcggttgtgaatataaacctcgtggcctcaccgaagaagggcttggctggtttgacgcctggcgctaattcgttaaatccctaattacaacgtacccatacatccccccatctacggatggggtaggttaactataactttcagacagggtttcccatgtccacaattacattgttatgcattgcgttagctggcgtaatcatgctgttgctgctggtcatcaaggcaaaggtacaaccattcgttgctttgctcctcgtcagcctgttagtcgcacttgcggcaggtataccggcgggcgaagtgggtaaagtgatgatcgccgggatgggcggtgtgcttggttccgtcactattattattggtctgggcgctatgctggggcgtatgatcgaacactctggtggtgcagagtcactggctaattatttcagtcgcaagttaggtgacaaacgaactatcgctgcgctgactctggcagcgttcttcctcggtattcccgtcttctttgatgtcggctttattattcttgcgccaatcatttacggttttgccaaggttgccaaaatatcgccactcaaatttggcctgcctgtcgctgggatcatgctcactgttcacgtggcggtaccgccgcatccaggccctgtcgccgcagcggggttactccacgcagacatcggctggctaaccatcatcggtattgcgatttctattcccgtaggggttgttggctactttgcagcgaaaataatcaataagcgccaatatgcgatgtcagtagaagtactggaacagatgcaactggctccggccagtgaggaaggcgcgacaaaattaagcgataaaataaatccaccgggcgtcgcgctggtcacctcgctaattgttattcctatcgcgattatcatggcgggtacggtttccgcaacactgatgccgccttcgcatcccctgcttggtacgctacagctgatcggctcaccaatggtagctctaatgattgcgctggtgctggcattctggttattggctttacgtcgcggctggagcttacaacacaccagcgacattatgggctcagcgcttcctactgcggcggtagtgattttggttactggtgctggaggggtatttggcaaagtgctggtggaatcgggcgtcggcaaagcccttgccaacatgctacaaatgattgacctgcctctgttaccagccgcatttattatttcactggcgctgcgtgcatcgcaggggtcagcaaccgtagcaatactgacaaccggcgggttactctcagaagcggtgatgggattgaatccgattcagtgcgtattggtgacgctggcagcctgctttggtgggcttggtgcgtcacatattaatgactcagggttctggattgtgaccaaatatctggggttgtcggtagcagacggtctgaaaacctggacagtgttaacgaccattctcggttttaccggattcttaattacctggtgcgtatgggcggtaatttgaccttaataaaaaggtccgatgggcatcggaccttttattgtgcacagaaaaggccagcctcgcttgagactggcctttctgacagatgcttacttactcgcggaacagcgcttcgatattcagcccctgcgtttgcaggatttcgcgcaaacggcgcaggccttcaacctgaatctggcgaacacgttcacgggtgaggccaatttcacgacctacatcttccagtgttgccgcttcgtaccccagcaaaccgaatcgacgtgccagcacttcacgctgtttggcgttcagctcgaacagccatttgacgatgctctgcttcatatcgtcatcttgcgtggtatcttccggaccgttctctttttcatcggccaggatgtccagcaacgctttttcggaatcaccacccagcggggtgtctaccgaggtaatgcgctcgttaagacgaagcatacggctgacgtcatcaactggcttatccagttgctctgcgatctcttccgcacttggttcatggtccagcttatgggacaactcacgtgcggttcgcaggtaaacgttcagctcctttacgatgtgaatcggcaaacgaatagtacgggtttggttcataatcgcccgttcaatcgtctggcgaatccaccaggttgcgtatgttgagaagcggaaaccacgttccgggtcaaacttctctaccgcgcggatcagccccaggttgccctcttcgataaggtccagcaacgccagaccacgattgccataacggcgggcaatttttaccaccagacgcaagttactctcgatcatccggcggcgagaggcgacatctccacgcagtgcgcgacgcgcaaaataaacttcttcttcggccgttaacagtggtgaataaccaatctcaccaaggtaaagctgagtcgcgtccaacacacgctgtgtggctccctgcgataacagttcctcttcggccaaatcgttatcactgggttcctgttctactaaggccttttcgtcaaaaacctcaactccgttctcatcaaattccgcatcttcatttaaatcatgaactttcagcgtattctgactcataaggtggctcctacccgtgatcccttgacggaacattcaagcaaaagcctggttccgccgatttatcgctgcggcaaataacgcagcgggtttacggatttccccttgtaacgaatttcaaaatgcaagcgtgttgaactggttccggtgctacccatggtcgctattttttgccccgccttaacttcttgttgttcccggaccagcattgtgtcgttatgggcgtaggcactcaggtaatcatcattatgtttgatgataatcagattaccgtagccgcgcagcgcgttaccagcataaacaacgcggccatctgcggtcgcgataattgcctgtcctttgctgcctgcgatatcaatccccttgttgcccccctcagaagcgccaaaggtttcgatcactttgccctcagtcggccagcgccaggtggagataggcgtactggttgatgtactgctgacagtcggctcggttgtgcttgctgttggtaccgttacaggcgctgtgaccgtggtcgcagttggcttgttgttcggcaacattttgttagcactctgttcacccgaagactcagaatacgtaattgtcggttgcgacgcaacagcaacggtggaattttgtgcaggcttgatcacaactccttgctctgctgcgtcggcctgggtaatggcatttccgccagtgattggcgtaccggaagcattacccacctgcaaggtctgaccaacgttcagcgcgtatggtgcctgaatattgttgcgctgagcaaggtcacggaaatcgttgccagtaatccaggcgatatagaaaagtgtgtcgccttttttcacggtataggtactgccgctataactgcctttcggaatgttcccatactgacggttatagacgatgcgtccgttttccatctgtaccggctgctgagctactggctgcactggctggatttgcggttgttgagtagcctgaatttgtggctgctgcaccggctgaatttgcggttgctgcgctgtagacgtcgtccccattttcggcggcggcgtaatcaacataccagaattagtatttgcaggcgcattgccattaacggagctgaccggtgccggtggatttgaagtgtcagaacagcctgccagccatagcgaaaccagtgacaaagccgcaatgcggcgaacggtgaattttgggcttcccgcgctcatttatcccccaggaaaaattggttaataaccagtgacataattaccgtgcaaggcaccctactgaacactggaaaagatgttcacgatacgctgacctgcggcaaaataaccaggaaaaatccaggtatttcctcacgttttaagccagctcacccttcactaaagggacaaagcgcacggcctccacggtatcgataataaattcgcctccccgacgacgcacccgtttcaaatactggtgctcctcccctacgggtaagacgagaatcccgccttcgtccagctgcgtcattagcgcagttggaatttccggcggtgccgccgtaacaatgatagcgtcaaacggcgcacgtgcctgccaaccttgccatccatcgccatgacgggttgaaacattatgtaaatcaagatttttcaggcggcgacgtgcctgccactgcaagcctttaatccgttcaaccgagcaaacatgctggacaagatgcgccaggattgccgtttgatatcccgaaccggtgccaatttccagcacccgcgactgcggcgtcagctcgagtaattcggtcattcgcgccaccatatatggctgcgaaattgtctgcccctgacctatcggcaaagcgatattgtcccaggctttttgttcaaacgcttcatcaacgaatttttcacgcggcacggcggcaagtgcattcagcacctgctcatcctgaataccttgcgcacgtaattgatccagaagtgcttgtacgcgtctgcttaccattgcgtgccaactcccacgctgtttaaccagtctgaaaccacatcttgcgcgctatgcgcagttaaatccacatgcagcggcgtgatggagacatagccctcatctaccgcagcaaaatcggtccccggaccagcatcacatttaccgcccggcgggccaatccagtacagcgtattgccgcgcggatcttgctgcgggatcacctgatctgccggatgtcgtgtaccgcagcgcgtcacgcgaatacctttgatttgatccaagggtaaatccggaacgttaatattaagaatacgcccggtgcgcagcggctctttacacagtgcgcgcaaaattgaacaggttaccgccgcggcagtgtcgtaatgtttatgcccgtcaagcgagacggcaagcgccggaaaacctaaatgacggccttccatcgcggcggctaccgtaccggaataaataacatcatcccccagattcggcccggcgttaattccggacacaacaatgtccgggcgcggacgcatcagagcattcacgccaagatagacgcaatcggtcggggttcccatttgcacagcaatatcaccattttcaaaggtaaacgtgcgcagggaggattccagtgtcagagaatttgaagcgccgctgcggttacgatcgggggcgaccacctgaacgtcagcaaactcacgcaaggctttcgccagcgtttgtataccgggtgcatgtaccccgtcatcattactcagcaatatgcgcataatcacctgttgtgttgataagttccctgacaacgctggttgcaaaactacccgccggaagccagaaacggatctctacggtgacgtcatcccaccaattccagcttaattgttgcggatacagcagcatcgctctgcgcgcggcttcaactttttcgcgcaccagtaaagcttgtaattcagtttctgcggcgacagctgcttgttcgaatgccagcgcttcacgctgagttccccattcgccactgcctggcaatgcggcggttatcatcaactctttatcgttgacgcgacgctgtaattccgccagttcttcggtggttgcgacaaaccagctaccacgtccggctaattgtagcgcatcgccgtcaacaacttgattaacgtctgcttttttgaggcgctcagcaacaatctgattaaacaacgcactgcgggctgccgacaaccaaaaactccgtttattgcgatcgcgcaccggagtattggtttgcgcccagcgctgcgccccctgcaagttgctaccgccaatcccaaaacgttgggcaccgaagtagttcggtacaccttttacgcaaatatcgatcagacgttgttcaacgtcatcgcgattgctcacttcgcgcagaaccagggtaaaggcgttacctttcagcgcgcctaaacgcagcttgcgcttgtgccgcgcatactccagcacctggcagccttccagttgaaaggcgctcagatcgggcatttccttgcccggcacgcgagcgcataaccactgttccgtaacagcatgtttgtctttttgcccagcgaagctgacttcacgggcatgaattttcaggaatttcgccagtgcatccgccacaaaacgggtattgcagccgtttttgaggattctaaccagaatatgctcaccttcaccatcaggctcaaagcccaaatcttccaccaccacaaagtcttccggattggctttcagcagcccggtgccttgcggtttaccgtggaggtaagtgagattatcaaactcaatcattttgttgccttaatgagtagcgccaccgcttcacaggcaatcccttccccacgtccggtaaatcccagtttttccgtagtagtggctttcacgttaacatcatccatatggcagccgagatcttcggcaataaacacgcgcatttgtggaatgtgcggcaacatcttcggtgcctgagcgatgatagtgacatcgacgttgccaagggtataacccttcgcctgaatacgacgccaggcttcgcgtagcagctcgcggctatcggcacctttaaatgccggatcggtatccgggaacagcttgccgatatcccccagcgccgccgcgccaagcaatgcatcggtcaacgcatggagcgccacgtcgccatcagaatgcgccagcaatcctttttcgtaaggaatgcgtacgccaccaatgataattgggccttcaccgccaaaggcatgtacgtcaaaaccgtgtccaattcgcattatgtattctcctgatggatggttcgggtgaggtaaaactcggccagtgccaaatcttccgggcgcgtgactttaatgttatccgcacggccttcgaccaactgaggatggaatccgcaatattccagcgccgaggcttcgtcggtaatagtcgcgccttcatttagagcgcgcgtcagacagtcatgtaacagctcacgagggaaaaattgcggcgtcagcgcgtgccataagccgttgcgatcaacggtatgagcaatggcatttttgcccggttcggcacgtttcatagtatcgcgcactggtgcggcgaggatcccccccgtgcggctggtttcgctcaacgccaacaatcgcgcgaggtcatcctgatgcaaacaaggacgagcggcgtcatgcaccaatacccactgcgcgtcgccagcggctttcagacctgccagcacggaatcggcacgctcatcaccgccatctacaacggtgatttgcggatgattcgccagaggaagttgtgcaaaacggctatcgccaggacttatggcaatgacgacacgtttcacccggggatgcgccagcagcgcatgcaccgagtgttcaagaatggtttgattaccgattgagagatattgcttaggacattccgtttgcattcgacggccaaatccggccgccggaaccacggcgcaaacatccaaatgagtggttgccatgttaattcccgggctgatttatcgattgttttgccccgcagactgtgcgcgcttcgacgcgtcaggcaccagacgataaaaagtttcgcccggcctggtcatgctgagttcattacgcgcacgctcttcgagcgcctcctggccgccattgagatcgtcaatttcggcaaaaagttgatcgtttcgcgctttaagtttcgcgtttgtagcttgctgtgccgccacatcatcattgacgcgggtatagtcatgtataccgttcttaccgaaccacagcgaatactgtagccagaccagaatagccagcaacagcagcgttagtttacccatcctgccccctgaaaaacggcatcatcatcccatgcatccgaagacgactctacatcctctgttggggataccgcgacaacgcgggcaatgtaccacattgtccattgttacgtatacccagggcgtgcagaacataatctcattattagttacggtttgaattatgaacagaggagacgggaaagtacaaattagcccagtagccacataaacagtgcgccaaacataatgcctactgtcaccagggtgaaaacaatactgtagcgtagctttccgtccatcaatgaatgcagcgcaatccccaccactaccgcgacgggcatcagcgccagaaagaaaggccaggtgtagataaagaagaacagcgtgttagagccataaatcaacatcggcatcgccagcgcaaataaccaggagataaaaccgaccacggcaccaggcagtgaccatgtggtttcttcatcctcagtaaggctgtcgttatttgttagtgtaatgttatggctattacgcatatttgatcctgttactttgacgaaccgggcatggaaacccggtggtgtctcaggatctgataatatcgttctgtctcaacagatctaataattgctgtaccaaatttgttactaattgttcaccattgagatgaatttctgccgattcaggcgcttcgtaaacggaatctattcccgtaaagttgcgcagttcaccggcacgcgctttcttatataagcctttgggatcgcgggcttcgcaaatcgccagcggcgtatcgacaaacacttcgataaagcgcccttctcctacgcgttcgcgaaccatctggcgttcggcgcggtgtggcgagataaatgcggtcagcaccaccagtccggcttcaaccatcaaattcgccacttcaccgacgcgacggatattctctttacgatcggcatcgctaaaaccgagatcgctgcataatccgtggcgaacattgtcgccatccagcagatacgtactgacgccgagtttatgtaacgcctcctccagcgccccggcgaccgttgatttaccggacccggagaggccggtaaaccacagcactacaccacgatgaccgtggtgtagctcgcgttgttgcacagtgaccggatggctatgccagacgacgttttcgtcatgcagcgccattatttatcccccagcaaatcgcgcgcgccccagtgcggaaagtggcgacgaaccagagcattcaattccagttcgaatgcactgaattcagatggcgcagcagttgcctggctaactggctcgtgcaccataccggcacccacggtcacattgctcaggcgatcgataaaaatcagcccacccgtcaccggattttgttgataacgatctaacaccagcggctcgtcaaaagtgagatccacgaggccgatcccattcagtggcaggttttcaacttcacgctgggtaaggttattaatatcaacctgatagcgaatgccatcaacacgcgcgcgcgtcttcttaccggcaattttgatgtcgtaactctgccctggagaaagcggctgttccgccatccataccacatccaccgacgcgctctgcaccgccggtaacgcttcgtctgccgccagcagcagatcgccacggctgatgtcgatctcatccgtcagcaccagggtgatcgcttctccggcaaaggcttcttcgcgatcaccatcaaaagtcacgatccgcgcgacgtttgattccacaccagagggcagcactttgacacgttgcccgacttccacgcgaccggatgccagcgttccggcgtaaccacgaaaatcgagattcgggcgattaacgtactgcaccgggaagcgcattggctgagcatccaccactcgctggatctccacggtttccagcacttcgagcagtgtcggaccgctgtaccacggcatactttcactttgcgatgccacgttgtcgccttccagtgcagagagcggcacaaagcggatatccagattacccggcagctgcccggcaaaggtcaaataatcttcacgaatacgggtgaacgtctcttcactgtaatccaccagatccattttgttgatcgccacgaccagatgtttgatccccaacagtgtggagataaaactgtgacgacgggtttgatcgagcacgcctttacgggcatcgatcagtaagatcgccagttcacatgtcgatgcgccagtcgccatattgcgggtgtactgctcgtgccctggggtgtcggcgataataaatttacgcttctcggtagagaaatagcggtaggccacgtcaatggtgatgccctgttcgcgctcagcttgcaggccgtccaccagcagagccagatccagcttttcgccctgggtgccgtgacgcttactgtcgttatgcagcgatgagagctgatcttcgtagatttggcgggtatcgtgcagcagacgaccaatcagagtacttttgccgtcatcgacgctaccacaggtcagaaaacgcagcaggcttttatgttgttgcgcaatcatccaggcttcgacgccgccttcattggcgatttgttgtgcaagtgcggtgttcatcttaaaaatacccctgacgttttttcagctccatagaccccgcctggtcgcggtcaatcacgcggccctgacgttcactggtggtggaaaccagcatctcttcgatgatttccggcagtgtttgtgcatttgactccaccgcaccggtcagcggccagcagcccagcgtacggaaacgcaccatccgttttttaatcacttcgcccggttgcaggtcgatacggttgtcatcaatcatcatcaacataccgtcgcgttccagaaccggacgttccgcagcgagatatagcggaacaatgtcgatattttccagccagatgtattgccagatatcctgctcggtccagttagagagcgggaagacgcggatgctttcgcctttgttaatttgcccgttgtagttgtgccacagctccgggcgctgatttttcggatcccagcgatggaagcggtcacggaaagagtaaattcgctctttagcgcgggatttctcttcgtcacggcgcgcaccaccgaaggcggcatcaaaaccgtatttgttcagcgcctgtttcaggccttcagttttcataatatcggtatgtttcgcgctgccgtgcacgaatggattaatccccatcgccacgccttccgggtttttatgcaccagcagttcgcagccgtaggctttagcagtacgatcgcggaactcatacatctcgcggaatttccagccggtatcgacatgcagcaacgggaaaggcagcgtacctggataaaacgccttgcgcgccagatgcagcatgacgctggaatctttaccgatagagtagagcatcaccggatttgagaattctgccgccacctcgcgaataatgtggatgctttccgcctccagttgccgcaggtgagtaagtcgtatttgatccataaccgttcctttgcaataccgctattttcttgccatcagatgtttcgactatagggagcgtaagagaacgaatgaaattaccaattagaatgagtagttccttaacggaataacgatttggcaaagctaatatcaaaaagtgcttaaggcaccggatttcgggcgtttaggaagatttgaaattgttttagcgcagcggcagtttcatactatggcggtaaaaaaatttgcatggtatttaaggactcactatgttttccgcattgcgccaccgtaccgctgccctggcgctcggcgtatgctttattctccccgtacacgcctcgtcacctaaacctggcgattttgctaatactcaggcacgacatattgctactttctttccgggacgcatgaccggaactcctgcagaaatgttatctgccgattatattcgccaacagtttcagcaaatgggttatcgcagtgatattcggacatttaatagtcggtatatttataccgcccgcgataatcgtaagagctggcataacgtgacgggaagtacggtgattgccgctcatgaaggcaaagcgccgcagcagatcatcattatggcgcatctggatacttacgccccgctgagcgatgctgacgccgatgccaatctcggcgggctgacgttacaaggaatggatgataacgccgcaggtttaggtgtcatgctggaattggcagaacgcctgaaaaatacgcctaccgagtatggtattcgatttgtggcgaccagcggcgaagaggaagggaaattaggcgctgagaatttactcaagcggatgagtgacaccgaaaagaaaaatacgctgctggtgattaatctcgataacttaattgttggcgataaattgtatttcaacagcggtgtaaaaacccctgaggcagtaaggaaattaacgcgcgacagggcgctggcaattgcgcgcagtcacggaatagccgcaacgaccaatccgggtttgaataaaaattatccgaaaggcactgggtgttgtaatgacgcagaaatattcgacaaagcgggcattgctgtactttcggtggaagcgactaactggaatcttgggaataaggatggttatcagcaacgcgcaaaaacacctgccttcccggcgggaaatagctggcatgacgtaagactggataatcaccaacatattgataaggctcttcctggaagaatagaacgtcgctgccgtgacgttatgcggataatgctacctctggtgaaggagttggcgaaggcgtcttgatgggtttgaaaatgggagctgggagttctaccgcagaggcgggggaactccaagtgatatccatcatcgcatccagtgcgcccggtttatccccgctgatgcggggaacaccagcgtcaggcgtgaaatctcaccgtcgttgccggtttatccctgctggcgcggggaactctcggttcaggcgttgcaaacctggctaccgggcggtttatccccgctaacgcggggaactcgtagtccatcattccacctatgtctgaactcccggtttatccccgctggcgcggggaactcccgggggataatgtttacggtcatgcgccccccggtttatccccgctggcgcggggaactctgggcggcttgccttgcagccagctccagcagcggtttatccccgctggcgcggggaactcaagctggctggcaatctctttcggggtgagtccggtttatccccgctggcgcggggaactctagtttccgtatctccggatttataaagctgacggtttatccccgctggcgcggggaactcgcaggcggcgacgcgcagggtatgcgcgattcgcggtttatccccgctggcgcggggaactcgcgaccgctcagaaattccagacccgatccaaacggtttatccccgctggcgcggggaactctcaacattatcaattacaaccgacagggagcccggtttatccccgctggcgcggggaactcagcgtgttcggcatcacctttggcttcggctgcggtttatccccgctggcgcggggaactctgcgtgagcgtatcgccgcgcgtctgcgaaagcggtttatccccgctggcgcggggaactctctaaaagtatacatttgttcttaaagcattttttcccataaaaacaacccaccaaccttaatgtaacatttccttattattaaagatcagctaattctttgttttcaaacaggtaaaaaagacaccaaccttaaaccatccaaatctaccggggtacgcctgtttaacccaaatgtctggaactcaaatcccgtttccgtattcgttgcccatgccatcactacattgccttcttccgccagtccagctatttgttcccagatcatttcacgaatttttgcggatacatcacctacatatacccctgcacgtacctccaacaaccagatggctaatctgcctcgtaagcgcggaggtacattttcagtgaccacgaccaacatactcatttcagctactccgatggcctgcatctcccagtgaaacaggaagcggaatggcaacaggctgtgcatcttcaggtggggccggcggttgtatttctccagcggcaagcacgtcctctataagcggaatcaatttggctaatgttttactactgcgaaaaatatccctgcacgccaaacggacttcccggtccggctcaccagggttacgacgcgctatctcaaaagctttcggtacaacagtgtcaaatttaatgatgtctgcaatatcgtaaacaaaggaaagaggctttcctgtatgcacaaacccaatagctggtgcataaccagctgcaagtatcgccgcttcagttacgccgtataaacaggaagttgcagcgctaatgcattggttgatcgtatcgcccttttcccagtctttcggatcgtagcgacgtccattccatgtcacgccgtattgcttcgccagaagtgcgtaggttgcccgcacgcgactgccttctatacctctgagttgctctacggagcgccgggcaggcgcaggttctccaaaccgaagttcaaacattttacgtacgaccttcagacgcaaatcttcatccagagcaagttttgcctgatagagcagcttatctgaacgcgcacctccaggctgaccagaagcataaacacgaacgcccgcttcccccacccataccaacaatgttccaacttgcgcagccaggcgtacagctgcatgcgaaacccgtgtaccaggttccagcatgatgcaggcaaccgagccaacaggaatatgagtgcggatccctgtcttgtcgataagtacaaacgcgccatctattacatcgatctgcccatattgcagaaagatcatggagacgcgatctttgagtggaatgggattaaggggaagccaggtcattttattacacctcaatcacagtggagccaaagatagcaagccacatcccatcgatttagctggcccaataccttgctgtacaagatctattaacgctggcgcgtcgttgatggtgagcacaccttcaaagcaaaccgtttggatctttccacttttaccatcaccagaaaaatactgtggccgttccgatatgggatgcacatcttcaacgcgcgccgcattgcccaatttacgttgcaaccacgcgatttgttctgcttcttttattaacggaacccgacagcgtttaatattccctttactgtccaggcgcttttgattgtcgagaatagttttgatcggatttgcccgaagccgaaaatagagtggaacaccaacctgaagttgaaattcaacctgtttagttttaatgactgtcgcaacggcagttgaaacaggcatttgcgctgactgcaataaaacatgacagccttctggtgtgtttcgcttctcaacatgaaaaagaaaatcacgagcagcatccggtctgtttggaaataaatgccataatccctggtgaagttggtaaagatccctgctccaggccctggcaatgatgactttactgagatacatccatacctcctttaatcacataccattctcgggaagcaaattgtcgaggcaaggtgatcatcggttcgtcgcgcgccgtaaattttaaatgatgccctgtaactgattcctcactatatatatcgccgccaacgggctcataatttaatagcgccttctgaggatccgatgcctgacatgtccccaaaaaaagcgggtgtgttagtgggcaacttctccgccccaggtaaggtgtataccgaggctttaatactgctttttcaagttctgagataaccatcgttgcatggggtgttaaccagagagcgacggtaaaggaggcatcacataaatattcgcgccatgtttgaatcgtttcatgacttttcaaaccacggtaatcttctcgcgctccaaggactgtatggtaatcacgcaaccccgttacagacacacgacgatcgtcaagaatgagttcatcgcagcgcactgcaaattgcacactctctgataacgcctgtaatgaagaagtatcatcacgttggatcccaagacaagccccgagtagccctaataacccgcttcgggtcggaaatcttccggtaggtcgcgttccttcaaaggtcggctgcccccaggcttgcattggcccagcaagccgcaagatcaaataagatctcatgttcacgcctcgccattattacgaacccaggattttaactgttctaaagtaggcatttgtttaacttgagcagtaattgggtctacatcagataagctgaattgcgcagcagctccgttcagaccatatccattggcaacgcgatcccaatattgattaaacgcctgtatagacggttgcaaaaagccatctttcgctttaaccgctttttcaaaagcatttgccatagaaagtggcatatcggagaaattaaccattaccatatccgcagggttaaaagcggcataagtacgctgttttgctccagggacctctgttgccagcatatgaacaacatgggttgcaatttccagagcctgctccctggaggcaccacctaaattttcctgaagttgagcgaggttaatgttggcataacgataaaaaacacccgatgaaaattcctgagttcccagatgtgcagaaccttgttcctgtaaatcatctacagcggtgaaccagtcaatatcagaatcaacctgatgagtagtgatcgcatgcgcaatggacattgcaccatcaacttttcccaactcagtcatcatgccgctggttgccattcttccactaagcgcaatatcaacaccctgctgtaaattcacacgtatggcggcaatatcttccttaagaactttgagcagctttttatcatccagattatcagcctctgcttttgcaacctgctcacagaaccaggctatttctcccacaacccagggagtaaccgcatcggcagaaatcttttcggcttcatcaactgatttaccggagagcagcgctaatgtcttatcgatgattttttggtcaaaacgttcaccaagtttttgccgaagaacatcacgtaattgtgcaagatgaatggttctgagactggattcaccaatattttgtgcgtaataaccacttttacgcatcgcacgtttaaggctttgacttgaaattcttactcgtcttttgccgccgaaaatagcgtctttctgcatgttcatatcgtcgcggttcagacatgaagggctgtgagagatcagaacatgaatattgataaagttagacatagaaaggtttccttacgcatttttgtttgtggtcaatacaaaatcttccagaagttgctggcgttcgcgctttccccaccaggtcaacatcctggccattaatggccagtcaagtacgggttcggcgtgagtaagtaatcgacgtaactggaccatatcggctgttctgtcagcccgaattaattgaaagatacggcgctcgttaattcttccactattggctaaagctcttcccaacgagatacctgttgtttgctccgattttttgtcctgatgtcggatgacattctttcctgcgctcaggcaaaacaccatgcgcaaaagagcctgctggtgacgtgggttttcccaaccaaaaggttgcaccagcctataaaacgcagggatatcgcgtaattcatcaggttctgaaacacgtctaatttgcgcacatgatccattatccagttgttgccaggctcgatataaagccattgcatcaatttcatcagccatttgatggccctccttgcggttttaactcccgtaaatgtttgtatagcgtggcgcgggcaagcgctaatgtgcttattaatttaggatgatgtgcatagggagctacagattgattaaatagcatttcacacaattgatgaagtttgtctcgtaaatcagctattacctcatcagcctgggaaaaattaacattcgccagtacatcgggaattaataattcactctgtcgatagaaatgcctttctgcagtctcatgaacagagactccggcccctttgaagtctttatttttaaacccttctgcaaaggtatataacgccttgcgtaaggctgttttatatcccaaaccaacagtcactatttcgtttatcacattgccgtattgttgccacccctgattaaacatcaacacatcatgacgccgttcaagaatagatgcttgattattacgatatccccccataatcaattcaagaggactttgcggcgcaatatttctgaattgattcacaaccgccgccacgcgatttccattttcattttgaataatcttatctaccacaactcggctgatttgtgtccatgatggtgcggaggtggtgaaagcaagaaatttttcctcaacctcccctttcttgactgttaccagacaaggggaatgcggatggggccatagcccattaactgtaaaggtaaatttttccttaagaaaaccggtataacgcaaattgctttcctgtccacagcaagaacatttaccaatcccaatgggatcgcataattcaatatgcgctggttgccagaatagaccacggacaaacccaattgacgaagcaggtatagactcattggacttgataggtttaatccaggtaggttggttttccgtatgtgattcattaggaaattgtttttgaagacgaggtaatgtgaggacattgagtaacaccgttgaacgaagatcgatcccacgtacgaacgttgttacaggtgttcctccacgtaaaccgcttttaaaaccaccaccaaaacctggtgcctgattcgcctggttgaataacgcaatcgcagtgcatccaccacataatgcttcaccctgccccggttgattgacaaatgcacaattcgtcgcgccgcttaccccagccaacagtttttccattggagtcacatcatttgctttgacacctttggtctgcataaagggatgttctgcgtgattaaggtagaacatatctatccacggcgcgatgagttgttgaaactcatcttcagtgagcggattcattatgcgatgtcgaaattcaacgtcatcttttgccggggcgataatttgcccaatgcaaaccagcagtgctaaagcggccagttccatatcgtcacggggcaaacttaatcgccactgatctctactgcagtatagcgattgcagatttatgatttggactttccccccgtttcgcgggcgtacagggatccagttatcaataagcaaattcatttgttctccttcatatgctccgacatttctcctgcatttctatacgtcggcacacttccgttatcggtaaaaacaaagaaaaaatacggcgtaattaattcaataatcacattcactgcaaaaatatattcattggtttaatacaattaacctatacatatattaagatgtgttgaattgtttaaagacaataatgcatgcatttcaaatctgcaagttattcgttttattattaaagaaacttttagttataataattaccatgaattttattacataaaatattcatactgtgaatataaaatctcataccgggaaattaaaagaagatgtacattgtgcaccttccctacttaagtagggataaaccgttattggtcttattatcgtcattgataacaatcattcccgaagttatttgggatttgcagggatgactctggtcatcccttcatcccctgtataggtaataacaatactgttaccctgccagacccatccatccagattctgtttcccttccagccaaagtaacccatcttcatctactacttcagaaaaactacgtttccaggtgaagggtacattgacgcgattaagtgcaagcgcctcatactgctgttcatgacttaggtcctcgtagacctggccatcgagcagttgtttacctgaagacgtttgtacataaggcaataatggcaggctcatttccccatccctcgttaccgcaagaatggtttcatcgttatcctgcaagctatattcttcagcccactgcaggaccttgcgagccttgaaccttttttcacactcggcgctttcaaatttatccatgccattgccgacccattctggctcatccatttccgcatcatcgtaaatgctatccagccattgccggtaagcatcagggaaaaataaggatgctccattaagctcctcaatatgttgctgcgtccgccacatgactctaacgttgctataaatatgctcatgtcgtccgtaaccctcgccatcaggcagcaaaatggtggcaacaggaatctcaaaaccagcgggacgatatttgcgatgatggcgatgtaaacggcccaatcgttggaaaagcaaatctgcaggacaatgctgagtaattaaccaatcaaaatcaacgtcgagtgattgttccacgacctgggttgcgacaagtatccgtccaacatttcgcttcccatttttgccgaaattgctaataactcgattctctttttcacgacgatcgttcagcgtaaagcgcgcatgaaacaaatctatatctacttgcgtgttatttagctcctttagccgttggtagcatacttgtgcaacgtcaaccaaattgcaaataagacagacctgtgcacccgcgtttgccgctgcgatcattcgctctaacatcgtaaggtcaggtaacatgtcagctaaacaaataggttctggctgaatcgaaaagcggggcgggagttgttctggatgagctagcagatcaaaacgttgcgcaccattcacacctcgccagttaatgagtggatatgcggagttattttccactggatctgtatgcagaccataagtatccagaagtttctgtttttgtttcattggtagggttgcggaaagaagaataacactccctcccacatcagcctgagccttgagcactgcctccagcaagccgttcatataggtgtcgtaagcatgaacttcatcaacaattaaaacacttcgaccaattcccaaaccacggataaagcggtgtttaactggcaataccgatatcaacacctgatcaatcgtgcaaacgccgatttgcccaagaaacactttcttattgctttgtgacaaccactgacaacactgaacccacgcttcttcttgcccctgttcagtaatcgcgcgtgattttattgattgaaagaggtggttaaaccgtgaattgccatgagcaagaataagatttggggatgaaaataagtggctcgcgctcgcttccattctcgtaagcatagcattcgcggtagcttgtgttgggagggcaaaaataacactatccgcaatttgttgatcaataagtttccaagcataggccagcgctgtttccgttttaccggagcctgtaggtgcctctattaccgtcagcccgggagctactggaagagcatcaactaacacctgtaattgtctgggttgatagccattgtccagtagtgcatgaacaccttcataacatcgcttatttgatacaagtccactcaactccaatacccggctcgcatcctgctgtcggtcctggaaatacgttctcagagcatttatgtcggaaggcgcatcctcattaaacagaaaggtattcgttgtagtccaggagcctaaccagtcagcaagcgagcaaaaacctgctaacagtgatgaacaatcaggtggtatatcgtttatagataaccccgctggcgttaaaaataatgcttccagtacagatatccactcctcacgagcctgtttatcttgcgcagcataagatgccagagaagctggcatttcccaacgcgacttatcttgatcctgggaatgtaatataaaaccatgatgtcctgtaacggcctctacccatggaaaccaggactcataaggatgaggagcggcatcaaaaaaactgaaaaaatccccgagagattgctctgaaagtgaatcctggttaaaccaatacagaccggctgcaccatgattaaatttacggcacatttgtgttgatggaccattaagtgatggcgttgcaggatttaatttcagccaactttctgctgatttatattggaatcgtatatcaaactttccaatatcatgaagagcaatgaaaaataacagccaggccttcaccctctgttttgatagcatttcatttcggcaaaaagtattttgcagtacgactgattgatcccaccagcaatctgcaacagcagcaacatcaaggcaatgataaattaacagatgaatatcatttcctttcgtcaagctttttgaggattttccccagtaatggcatatatatttaaaaggttccattaatagcctccctgtttttttagtattatcgatgatatcagcgggctatttttcgatgctgctcataaatatcgaattacagtgatatacacatgtcttgcctccctgcaaagaagagactaacattcgaattgtttgggttcgaacgctggcctcaggttgatagaaatatcgcctggggcttttgtccatctggaacctcgcgaatgcttaacgccagacagcctcaagcacccgacgccattctatacctgataattcttcccgcggcgttcacgtttaaaatcaggaatgctgctcgcaaaataaaaacgcccccatcatttctgacagaggcgtttaatttgtccggcaatatttacccttcgtgtaacccacattccctttttaagccaaagaaacgcgtttcttcttccgccatgccgggttcccatttacgggttgtatgggtatcgcccaccgataaatatccttcatcccataatgggtgatatttcaggccatgtttttgcaggtactgataaatagttcggttatcccagtcgataatcggcagcactttaaatacgccacgctgaattgccagcaccggtaaattggcacgactgccggattgttcacggcgcaggccagcaaaccaggtttgcgcattcagttctttcagagcccggttcatcggttcgactttgttgatgtcattgtacttttcaatgccttcaacgccctgctcccacagttttccgtagcgtgcttcctgccaggctgcgctttcggtagcacggtacactttcaggttgagcttgagtttgtccgttaactcgtcaataaagcggtaggtttccgggaacaagtaacccgtatcggtgaggatcaccggaatatccgggcgaatttgattcaccagatgcaggctcaccgccgcctgaatgccaaagctggaagaaagtacatattcaccgggcagattatccagcgcccaggctacgcggccttcagcgtccagtttttccagttcggcgttagtttccgccagcgccagaatgcgatctaccttcggcagttcgttcagggcgtttagatcgagtttggacatagattcctcactgtttgccttgcctgatgcgacgctcacgcgttcttatcaggcctacaagaccgggctgatggttaatcccacaaatcacgcgccggatcgagcaccgggcgaatgatgcccgcacgcaccgtaaagtcgccgaagccttcacccgcttcgcgctctttcgcccagcgccctatcagttcatcaagcgacgccaggatttccggctcggtgatgttttctttatacatccgtgggatacgtgtcccaatgcggttgccgccaagatgcaggttgtagcgacccggcgctttacccaccaggcccacttccgccagcatcgcgcgaccacaaccgttcgggcagcctgttacacgcatcacgatatgctcatcgctgacaccatgtttcgccattaaattatcgatgttgtcgataaaagacggcaggaaacgctctgcttccgccatcgccagcgggcaagtcgggaatgacacgcaagccatcgagttttcacgctgcggcgtgacggcattcattaacccgctctctttggcgatcttctcgatcttcgctttctcgctttccggtacaccggcgatgatcagattctggttcgccgtaatgcggaaatcgcctttgtggatcttcgcgatctccagcaggccggttttcagcggacgcgccggataatcaaggatgcgaccattttcgataaacagcgtcaggtgccagttatcatcaatgcccttaacccagccaatacgatcgcctcgtccggtgaactcatatggacggatcggttcaaatttgatccccgcgcgacgctccacttccgctttaaacgtctcaacccccacgcgctccagcgtgtatttggttttggcatttttacgatcggttcggttaccccagtcacgctgagttgtcacgacggcttcggccaccgccagcgtatgctccagcggcagatagccaaactcactcgcggtgcgggcgtaggttttcttgttgccgtgttcgatggaaagcccaccgcccaccaacaggttaaagcccaccagcttgccgttttcggcgatcgccacgaagttcatgtcgttggcgtgcagatcgatatcgttctgtggcgggatcactaccgtggttttgaatttacgcggcaggtaggtctggccgaggatcggttcttcatcagtagtggcgactttttcctggtcgagccagatctccgcatacgcgcgggtacgaggcaacagatgctcagaaatcttcttcgcccactcgtacgcttccgcgtgcagctgcgactcgtaagggttcgaggtgcagagtacgttacggttcatgtcgttagctgtcgccagcgcatcaagaccgaccgagtgcagcatctggtgcaccggtttgacgttctttttcagaatgccgtggaactgaaacgtctggcggttggtcaggcgaatgctgccatagatggtgttttcaccggcaaatttgtcgatcgcctgccactgtttagtggtaatcaccccacccggcagacgacagcgaagcagcatcgcgtggcgcggctccagcttctgttcagcacgttcggcgcggatgtcgcggtcatcctgctgatacatgccgtggaagcgaatcagcaggaagttgtcgcccttaaagccgccggtcagaccgtcgtttaaatcttccgcaatggtgccgcgcaggtagttgctttcatgcttcatgcgctcggcgtctgtcagttttccttcgaccactaaaggccctggatgtttttcgctcattagtagacatctcgctgataacggcgctctacgcgcagctcacttaaaaattcatccgccgcttcggtgtccatgccaccaaattcggcaatcacttccagaagtgcctgctcaacgtctttcgccatgcgattagcgtcgccgcagacataaatgtgggcaccatcattgatccagcgccacagctccgcgccctgttcgcgcagtttgtcttgtacgtaaactttttctttttgatcgcgcgaccaggcaagatcgatacgtgtcagcacgccatctttgacgtagcgctgccactccacctggtacaggaagtcttccgtaaagtgcggattaccaaagaacagccagtttttacctggcgcttcgtcggcggcgcgttgctgcataaaggcgcggaacggcgcaataccggtgcctgggccaatcataatcaccggggtttctggattggctggcaggcggaagttatcgttatgttcgataaatacgcggacttcgccctcttcttccacgcggtcagcgaggaagctggaggcaccaccggcacgggcgcggccttccacgtcgtaacgcaccacaccaacggtgacgtgtacttcgttctcgacttccgcctgcgaggaggcgatggaatacagacgcggcgtcagcgggcgcagcagattaattagcgcttcggcatcaagctgtgccggggagaaacgcaccatgtcaacaatcggcgtcgtcgcggcgtaatgctgtaacttcgctttatcgcccaccagcggcagcagtgtttcactgcgggtaagcgtggcgtaattctcaacaatgttggcggtgttgacggtcagttcgaagtgccactgtagcgcttcgttcagaggcaacgttttgccctcgacggtgacaggttcatcgcctttcagccacagcagttcgacaagttctttcaccagtgccggatcgttctgataccagacgcccagcgcgtcacccggctggtaacgcatgcccgagtcacctaagtcaatttcgatatggcgaacgtctttttcagagttacgcccggtaattttctggttaacagagaggctagccaccagcggcgcgtctttgctgtacgggctggtgtggatttcatttaccgcgccagtagcgacggattgcgaaggtgccgcgacaggcgcacgcgatttaagcgcatcaaccacgcgggcgcgccactcgctggcagcagcctggtattcaacatcggcatcgacacggtcgagcaggcgttcaccacccagttccgccagcttgctgtcgaaatctttcccggactggcagaaaaattcataagagctatcgccgaggctaaacacggcaaacgcggtgttttccagctttggcgcttttttggagaacaggaacttatgcagcgcgacggcttcttccggcggttccccttccccttgcgttgacgtcactacgatgagcagtttttcgctggcgatttgtttgaatttatagtcgcccgcgttcaccagcttaacgttcagttttgctgctaataaatcatcacgtaatgcttcagcaacccggcgcgcattgccggtttgcgaggcggagataatagttatacccggcatttctgcggctggcgctggcgtcgctgcaagcgcagcaggctgctgattgagtacgccccagaaatagccagaaacccaggcaagctgggtgggagttaaatcggtcgtggccgcctgaaggcgtgccagttgctccgggttcaacggaagcaacgcggaaggtgggacctgtgtcgtcatgcgtcgttatgttccagtaagcaaagctgtttctgcgccctgtcagcgcccataaaacagaagagaaggtaaggttaacggggcaaacggtgtggattaaagacgggatagcgataactaataaccaaatcgactaacctgttttagcaatagtctttaacaacaaaatagattaaccaacctaatgaaaaacaaatgaatttagccaatcattaagataaatcagcgattttgcgcaacaaagtcgttttagataatgcgaaaaaacagcctttccggtactctacggcggttttatcgtcctgtagagaaattatgatgtccaccacgttatttaaagatttcaccttcgaagccgctcaccgcttaccacacgtcccggaagggcataaatgtggtcgcctgcacgggcattcctttatggtgcgactggaaattaccggggaagtcgatccgcatacgggctggattatcgatttcgctgaactaaaagcggcgtttaaaccaacctacgagcgcctcgatcaccattatctcaatgatattccaggtctggaaaacccaaccagcgaggttttagcaaaatggatttgggatcaggttaaacccgttgtgccgctgttaagtgcggtgatggtaaaagaaacctgcaccgcaggttgtatctatcgcggcgaatgataagagtgtgtcggcggtcaatttcccttaagtaacgctatgttagggtgttgtgttctggatatctggggcatgacatggaagacgactgcgacattattattattggtgccggtattgcaggcaccgcttgcgcgttacgctgcgcgcgagcgggtttatccgttttgttactggaacgcgctgaaatccccggcagcaaaaatctttccggcgggcggttatatacccatgcactcgcggaactcctcccgcaatttcatctgaccgcgcctcttgaacgacgcatcactcacgaaagcctttccctgttaacgcccgatggcgtaacgacgttttccagcttacagcccggcggtgaatcctggagtgtattacgtgcacgattcgatccgtggctggttgccgaagccgaaaaagaaggtgtcgaatgcatccccggagcgacggtggatgcactgtatgaagaaaacggcagagtctgtggcgttatttgtggtgacgatattctccgcgcccgttatgtggtgctggcagaaggtgccaacagcgtcctggctgaacgtcacgggttagtgactcgtcctgctggcgaagcgatggcgttggggatcaaagaagtgctgtcgctggaaacatccgctattgaagaacgttttcatctggagaataacgaaggcgcagcgttgctgttcagcggcaggatctgtgatgacttacccggcggcgcatttctttatactaatcaacaaacgctctcgttagggattgtttgcccgctctcttcccttacgcaaagtcgtgttccggcaagcgagctgctgactcgctttaaagcgcatccggcagtgcgcccgcttatcaaaaacacggaatcactggagtatggtgcgcatctggtgccagaaggtggcttgcacagtatgccggtgcaatacgccggtaacggctggctgctggtgggcgatgcgttgcgcagttgcgtcaataccggaatttccgtgcgcggcatggatatggcgctgactggcgcgcaggcggcggcacaaacgctgataagcgcctgccagcaccgcgagccgcaaaatctgtttccgctttatcatcacaacgtagagcgcagcctgctgtgggatgttctacagcgttatcagcatgttccggcgcttttgcaacgcccgggatggtaccgtacgtggcctgcgttaatgcaggatatttcccgcgatttatgggatcagggtgataaacctgttccaccgctgcgccagttattctggcatcatttacgtcgtcacggcctgtggcatctggcgggcgatgttatcaggagtctgcgatgtctgtagcccgtaatctctggcgcgttgctgatgcgccgcacattgttccggctgactccgttgagcgccagacggcagaacggttgattaacgcctgtccggcaggtcttttttcgctcacaccggaaggtaacttacgtattgactatcgcagttgcctggagtgtggcacctgccgtttgctgtgcgacgaatcaacactacaacagtggcgctatccgccttccggattcggcatcacctaccgctttggataaataataaggataatttatgcccctcttacacctgctccgccagaatccggtgattgctgccgttaaagataatgccagcctgcaactggcaatcgattctgaatgccaatttatttccgtgttgtacggcaatatctgcaccatcagtaatatcgttaaaaagattaagaacgccgggaaatatgcttttattcatgttgatttgctggaaggcgcgtcaaataaagaagtcgttattcagtttttgaaactggtgaccgaggcggacggcattatcagtaccaaagcctcaatgttgaaagcggcaagagcggaaggttttttctgtattcatcgcctgtttattgttgattcaatttcgtttcacaacattgataagcaagttgcgcaatcgaatccggattgtattgagatcctgccaggctgtatgcccaaagtgctgggctgggtgacagagaaaatccgccaaccgctgattgccggtgggctggtgtgcgatgaagaagatgcgcgtaatgcgattaacgcgggtgtcgtggcgctttccaccacgaataccggggtctggacgttagcgaaaaaattactttgacgggataatcgtaaccaattgaatttggtttgatttgtaggccgcacgccacatccgacattcagcgcctgatgcgacgcttgacgcgtcttatcaggcctacaagtccccaggccagaaccgtaggcaggatcatccggcaacacgttattggcaatctgcgtgaatgtttgtcaccagtgcctccagcaccactttccagtcatcaaccacgccaacatctgcctgtgaaaataccgcagcgctggcgtcatgattaatcgccaccacaaacttgctattgcgtacgcccgccattaacgctgctgcgccagaagcgccaacaacaatacacacctcaggtgccagcagatgtccggaaataccaatcactttttcagcatcaacgccaccgttcatcactcgcgcccgactgtagcccacttcggctcccagcttttctgccagcatagcgatttcctggttatctgcctctccgccctgccccaccaccagcacccgtctggcctcagctaatgggtcgcgggtaacatttttcagatcctctgtgctaaccagccagtccggaagcgcacccgggacaatgttcagttgttgcattccagagggcaacgtggcgtttttcgctgctcccgcctgacgcgccagggaaaggcatagcgggcgtttttctgtttgcagcgtcgccgttagcgcatttccccagtgggatttgcgcacgcttacggttggaatatctaacgaagtcacctggcagatgcttgcaccatgtaaacgccaggccagccgggtcgacagttcatcgccaaacgttcccggcggaaagagaacaacgtccgcaggcgttcgctgccactgttccaccaacgcatccagcacctgttccgccactacaggctgaggttcaatctgccagtgcgccagggtacaaccgctgaaatcctgcgccgccagccagcttgctattgcggcattctcctgatttattgtcacaattgcgatattcatggctgcatcctttggcgtaaatagtcctgccatagcttttgagctttttctgctaccgtttgcccatcaatcagcgtcgctccggcgtcgttgctctgctcttgccagttgcagacactgcatcgctggcatttcggcagcaacagttttacggataatttctgctttccccgcagccattcgctggcgcattcccggtactggcaaggccacttcaccgcactgacgcacggcaatcaccgcaggcaagcgaacccggcaacaacgcaacccatgttcagtacgctgttcgagggtgataaacagcgcgtcgagagtgaaacgctccacctgggtgaagcagggccagcccagcatttccgccagcaaaaatggcgtttgcccattctgcccttcgctgctttggcagccggtaattatcagatccagcggattctgatgctgccattcggcaatatggcgagcgacaaattccggcgcaaagcgcagatctgccgccgtctccagcaatacagcttcctcaaacccaagagccatgagatagcgcagccagtgcaatgcccgttcatcccccatgctcaacgcggttaaagacatcggcgtaccgttttttctctgcgccaacagcagcgcggcagcggcctgttcatcagcaccgagtaaacttcgcagtagcgaaatatccggtccgcttttaccctgagccgccgcctgccactctttttccgccagcattccggcatccggttcggctttaaacgctaacagaatgttcattcgcacctcctacatttcccgccgccaccagcgggagggctttagtttctggtgcccatagccaggtcacaacaaaaccaaccaacaacactgtcgccaggagcaataaggtgacttgcattccccactgcgccagcacccacggcagcaggccagtacttaccgccgcgccaagtcgactcatggcagtggcaaaaccgacgcccagcgagcgaatgtcagtaggaaaactttccgcaggcaaaatgcccaccagattactgactgccgaaatggtggtgctgaagagaacaaaaagcagcagcgttaatgaactgccggaaggcaaacaggccatgactaccagcgttgccgccagcagcaaaaaacttcccagcaaaaatttgcgatgtgccagcaggtgcgtcagaactaatcccagcagcgcgcccacaattaacaacgcattaagcatcaggctggcagtcagcgcatcttccagaccaatagtctgggcgatagttggcagccaggtataaatcacaaaccatgggattacgaggcagacaaagaagacgctgttaaacgccgtgcgccgccagtaacgcgaagagaacaaggttttgatgtgtttatgggtcgccgttaccacttcatcgcccagtaaaacatggggaccaaaatagcgatgcacgatagcgtgagcttctgcaaaacgcccctggcgcagtagccagcgtggtgattctggcgttccccagcgtaataacgtaatcaacaacgcgggcagagctgccgatgccagtagccagcgccaggcctccgggttttcggaaataaagtgatgtccggcaatacttgccagcacatagcctacggtccacaccacgctgaatgcgcccagcaaaataccgcgatggcggcgcggggaaaattcagccagcaaggtgtgacctactgaataatcgcctcccagaccaatgccaatcaaaatgcgcagtccaataagatgctctggcgtggtggcaaaaaattgtaaaaacgaagcaagcgtaatcagcaaaaagctgaaggtgaagattttttgccgaccaatatggtcggagatccacccaagaaccaggctgccaaggaacaaaccaaggagcgccgagccgccgatcattcccgccataaacggcgtcagttgcatggcgggcgtaagctgaataatggcgtaaccaatgacgccgagaacataaccgtcggtcaggtgtgcgccgaaagtgagcgcagcaatgcggcagtgaaaacggttaagcggtaaatcatccattcgcaccggtgaagtgttcatctttaccccttcattgtccggtaataagaacggcttctcgcctgagaagccgaaaaggcaacgccccgtcatcgcggaacgctgcctgacacattatttttcaatcggatagatagtacccgtattcataatgccattaggatcgaactgctttttcagcccttccagcaacgcccacgcgctgccgtgttccagtttgctccagtgaacgcgatgtttaccgataccgtggtggtgcaccatcgaaccgccgaggcgaatggtttcttcacagatgatcttgttgagcggattgtggtacttgtcgatttcctcttccggcttacagtcaacgacgttgtaatcgtagacgaagtacatgttggtgccgttctgatagctatgagaggaatgaccgcccagcatggtgatgtcgtcggcgtgcgggaactcagtacgaatacggttaataacgctttcgtagatttcgtggatgcagctccagcagccggatacttcggtggtaaagcccatgttgccggttttgaggatctgcacacgttcggcagccactttatccggtccccagttcaggttgttaaaccaggtttcgatcagcttgctgtccacgcgctggcattgcgggtagcgggcaacgatttccgcaatcccttcgcccgtcaccttcgcaatgcgagggttaccttcagccataaagatcagcacgcattttccgtcggcaaaatgggtgaagtgttgggtgccatcttcagcgtcatacaaacgagcgattgacggacgatacccttccaccatgatttcacgcaggatgttgaagccggttttcatgtcttccaggatatagccgtagaagaggttgttttccggggtgaatttaaagattttcactgttacttcagtgatatagcacaatgcaccttcgttgcgatgatgatgtgacgaatgtccgggccagccgcgcggcgtggcacgtttttaatgcgtgtgacggtgccatcagccaatactgcttccagaccaacgaccatatcttcgattgcgccgtagagtgtggagaactgcccgatacttcgggttgctaccaggccgcccatctgcgccagcggctttgactgcggagaatgccccgtggtgtaacctttttcacgcaacgcgttttccagcacttccagcggaacaccacattgcgccgtcgcctgcatattctcaatatcaatattaatgatttgattcatggcggagccgtcgagcaccaccgagttttctacaacagtttccagccaccttcggtggcggaagcaccggtacgcggcacaccgttaattttgtgcgcattcataaaattcagcacacgggatacttgctctgtggaaccgagttttacgaccgctgccggaatcggcaaagtataaatgccatgaatatccggaaatttacgaaaacggtcaatactgtttttctttaatactgtttcatcggtaattacgcgatctgcaccaacaatttcctttagctggtcgacaatcgctgcgcgagataaagacatagtaattccttcctgataataaaaatggaataatcattaataagagaaaacagaaaccaccgttatgggttagcgcactaaataaccgccatcaaccactaataaatgcccgttgacataattcgatgccggacttgcgaggaatacggctgcgcccattaaatcctgagtatcgccccaacggtttgccggaatatgatcaagaacgcgctgattggtttctggattactgcgtgtcgccagcgtaatatctgttgcataatagccaggggcgataccatttacctgaatattatattgacctagttcatcacaataagctttggtgaacccggcaagagcatgtttagtggcagaatatgcaggtgaccattgtccacctaagtaagagaacaatgaacagatattaataattttgccgcttttctgcgggatcataatttttgcagcttcatagcttaactcgaatgcggcggtcaggttcacatcaatcatcggatcccagtcggcacgaccgaagtccagcaccttattcagcttacaaataccggcattgttaaccagaatatcaactgtaccgaaacgctcacagcaagcagcgataatcttctgcggcgcgccttctgcggtgatacccacctgcatgaagtccacctcaacaccctgtttttcaatcatttcctttgtttcgccgttatctttgacgaaactaggaataaagatatttgcgccagctttggccaacgccatggcaaatgcctggcctaaaccgctattcccaccggtaacaattgcggttttacctttcagggagaaaaaatccattgagaacgcattgagagattcgattgacatagttagctccaatttccgtaaggcaaaaaaaaagaaaggtaacttcccccgcgagagggaagttacctttctcattatctctggtaactggagataatttttagcataagggcataactgctaatgtgatcgtaatcacagtgtgatattcgtattgtcaaataattttaaaaagcagaagcgtgattactctcacacaacacctctgctttccatgttatttattatttcaattactagagacctgagaaaagtaatccacctgaaagggcggcttacttttctcttttttttgtctattacaaatgggaatacgatatgcaacacaactcatatcgccgttggataaccctcgcgataattagttttagcggcggcgttagtttcgacctggcttatttacgttatatttatcaaattcccatggcgaaatttatgggattcagcaataccgagataggtttaataatgagtacctttggtattgcggccattattctttatgcccccagcggcgttattgccgataaattttcacaccgcaaaatgattacttccgcgatgatcattaccggattactgggtctgttaatggcaacgtatccaccgctgtgggtaatgctctgtattcagatcgcctttgcgataacgacgattttaatgctgtggtcggtgtcgattaaagctgcatcgttgcttggcgatcatagcgagcaagggaaaattatgggctggatggaagggctgcgcggcgtcggtgtaatgtcgctggcggtgtttaccatgtgggtcttttctcgctttgcaccggatgacagcaccagcctgaaaacggtcattatcatctatagtgtggtttacatcttgttggggattctgtgctggttttttgttagcgataacaacaacctgcgcagtgccaataacgaagaaaaacagtcattccagcttagcgacatcctggccgttttgcgtatcagcaccacctggtattgcagcatggtgatttttggcgtcttcaccatctacgccattctgagttactccaccaactatctgaccgaaatgtatggcatgtcgctggtggcggcgagctacatggggattgtgatcaacaaaatattccgcgcgctgtgcggcccacttggcggcataatcaccacctacagcaaagtgaaatcccctacccgcgtgatccaaatcctttccgtactcggcctgctgacgttaactgccctgctcgtcacgaactctaacccgcaatcggtcgcgatggggattggcctgattttactgctgggattcacctgttacgcctcacgcgggctgtactgggcctgccctggcgaagcgagaacaccgtcttacattatgggcaccacggtaggtatttgttcggtgattggattcctgccggatgtcttcgtttacccaattatcggccactggcaagacaccctgcccgctgcagaagcctaccgcaatatgtggctgatgggcatggcggcgcttggcatggtgattgtctttacctttttgctgttccaaaaaattcgtactgctgatagcgcccccgcaatggctagcagcaagtaagccaggaaaattacaggagaaaaatcatgtcgaaaaaatacatcatagggattgatggcggaagtcagagcacaaaagtggtgatgtacgatctggaaggtaacgtggtttgcgaaggcaaaggcttattacagccgatgcacacgccagatgccgatactgcagaacatcctgacgacgatttatgggcatcattatgttttgccggtcacgatttgatgagtcagtttgccgggaataaagaagatattgtcggtattggtctgggatccatccgttgctgccgtgcgttattgaaagccgatggcacgcctgctgcgccgttgattagctggcaggatgcacgcgttacacgcccttacgaacacactaaccctgacgtggcatatgtcacctctttttcgggttatctgacgcatcgcttaaccggcgagtttaaagacaatatcgccaactattttggtcagtggccggtggattataagagctgggcatggagcgaagatgctgcggtaatggataagtttaatatcccccgtcatatgctgtttgatgtgcaaatgcctggcaccgtcctcggacatatcacaccacaagccgcactggcgacacatttcccggcaggactgccggttgtttgtaccaccagtgataaaccggtagaagctctgggggccggattactggatgatgaaacggcggtaatttctcttggcacttacatcgcattgatgatgaacggcaaagcactgccgaaagatccagtagcgtactggccgattatgtcttctattccgcaaacattgctgtatgaaggttacggtattcgcaaaggcatgtggacggtgagctggctgcgcgacatgctaggcgagtcgttaattcaggatgccagggcgcaggatctttcaccggaagatttactcaacaaaaaagcttcttgtgtgccgccaggctgtaatggtctgatgacggtgctggactggctgaccaatccgtgggaaccgtacaaacgcgggattatgatcggctttgattccagcatggattacgcatggatatatcgttcgatactggaaagcgtggcgctgacgctgaagaacaattacgacaatatgtgtaatgaaatgaatcactttgcgaagcatgtgatcattactggcggcggttcgaacagcgatctgtttatgcagatttttgccgacgtgttcaaccttccggcacgacgtaacgccattaacggttgtgcaagcctgggggcagcgattaatacagcggtaggtctggggctatacccggattacgcaacggctgtcgataacatggttcgcgtgaaagatatctttataccgattgagagcaatgccaaacgctacgacgcgatgaataaaggcattttcaaagacctaaccaaacatactgatgtgatcctgaaaaaatcgtatgaagtgatgcatggggaattggggaatgtggattcgatccagagctggtcgaatgcgtaagtgaggaaggccgggcgggaaactgcccggcctgaacatacctgaatggttatccccgctgacgcggggaacataagttcgacaacttaaaaaatgataacaagtccggtttatccccgctgatgcagggaacataataaaaactttaactagttcggtttatccctgtttttacaaggaatattaactacactcgatgtctttagaataaaagacaatacgaatcgcactttatcaattttcacttaaagtatgaactggatatctttattcataagaactattcatcaacagcgtatagaggcggttatgtaaaaccactcattagcctcaaaacaaagacaaacttccagatttattacttaaccaatgaataacaagcttaaaaaatatactgttattctaaagaaaaaattaacaggcattaattcaatattaaaaaaataatagattaaaatttcttaacgatttaagaatcatacaaataacactttgattaaatttaattttttgtatcgataattgtgaacctctctggcatggagaactattttgaacatgaggtgttacgtggatatgttgcttattacaagtactgctaatataaaaacttgagaaagagataacgggttatatggtggtttatccccgctggcgcggggaactcgacagaacggcctcagtagtctcgtcaggctccggtttatccccgctggcgcggggaacacctgttttcgcaaatcttatggactattgctattcggtttatccccgctggcgcggggaacacgggcgcacggaatacaaagccgtgtatctgctcggtttatccccgctggcgcggggaacactggctctgcaacagcagcacccatgaccacgtcggtttatccccgctggcgcggggaacacgaaatgctggtgagcgttaatgccgcaaacacaggtttatccccgctggcgcggggaacacattacgcctttttgcgattgcccggtttttgccggtttatccccgctggcgcggggaacactctaaacataacctattattaattaatgattttttaagccagtcacaatctaccaactttatagtatcacacaaacaacacatccattatgttaaagagcacttaatccattgattaaaaaggtaaatatttaaaataactctatacaaactaaaatctaccaaactttaccgcaataattttcactccagcgaaaaattaatgccacagaatttgtagagaatgctaatgattagccctggatgggtaaaatggaggagttttcagaggcgacaaacaatataaatgagtagaagtctttacaggttccacccatttataacgcttataaatgtttaatcaggcaatatttagatatttatgtgtttgcatcgacaaacgccaattacgcgcaatgcaggtttcaatgcacaaacgtgtggcatcatccttttggctaatcggctgcagtgcaatgactcgcggtttatcatcggtcagcgttgccagtagttcatccagtgcttcaatatcgcgtacgcgccccactggatgcttgatttcgttggctcgctccagtgcctgtgacaacacttcatagccgccgcgcatgttcagctttggcgatacggtaacccaggtattcggtgtgcagcgtacctcatgagtaccactggtttcgatctggcagctaaaaccgttcttttcgagcagatcagtcagtggcagcaaatcatgaatgcaaggctcaccacccgtaatcaccacatgccgcgcggtgtatccctggcgaccaatgacagccagcaaatcttcactgctcgcagccccccacttatcactctctttggtcttcgccagaatgctgaaaagggagacttcccgatcctcaagcttttcccaggtgtgtttggtgtcgcaccaggcacagccaaccgggcatccctgtaaacgaataaaaatggcgggaacgccggtaaagtaaccctcaccttgcagggtctggaacatctcgttaatcgggtactgcatagcattctctgtgaagtggataattgttaattattgcagatcctgccacaacaatcatgtcttattaacattctgttacaggcaggtttaaagaaaaatgcgaaacatatcgttaataattaaagggagtaacgtattatgtcagaagaaaataaagaaaatggatttaatcatgtcaaaacattcaccaaaattatatttattttttctgtattagtttttaatgataacgaatataaaattaccgatgccgccgtcaatttatttatccagatttaatgagaaatttataatgcgctatttcatactaatgttcactttcgtatgttcctttgttgcagcccaaccaactattgtcccacaattacagcaacaagttacggatcttacgagtagcttaaactcacaagaaaagaaagaactgacgcacaagttagaatctattttcaataatacccaagtgcaaattgccgtattaattgttcccacaaccaaagacgagacaattgaacaatatgctacaagagtttttgacaattggcgtttaggagatgccaaacgtaatgatgggatactgatcgttgttgcctggtcggatcgcactgtccgcatccaggtaggttatgggctggaagaaaaggtaaccgatgctctggctggagatatcatccgtagcaacatgatacccgcatttaaacaacaaaaattagctaagggattagagctagctataaacgctttgaataaccaactcacttcacaacaccaatatccgactaatccttcagaaagtgaatcagcgtcttccagtgatcattattactttgctattttttgggtatttgcagtgatgttcttccctttctggttttttcatcaaggcagtaatttttgtcgcgcatgtaaaagtggagtctgtatttcagcaatctatcttttagatttattcctgttctccgataaaattttttccattgctgtattttccttcttttttactttcaccatatttatggtctttacctgtttatgtgtacttcagaaaagagcatctggtagaagttatcattcagacaacagcggttccgctggaggctcagatagcggcggatttagcggcgggggcggttcttctggaggtggcggcgcatccggccgctggtaactcaaccataaaaaatgccagcccggaggctggcatttttaaatcagataaagtcagtcttatgcctggcctttgatctctttacgaccgttgtacggtgctttttcgcccagagcttcttcgatacgaatcagctggttgtatttagcaacacggtcagaacggctcatagaaccagttttgatctggcctgcagcagtaccaacagccaggtcagcgatggtagcgtcttcagtttcgccagaacggtgagagataactgcagtgtagccagcatctttcgccatcttgattgcagccagagtttcggtcagagaaccgatctggttgaatttgatcaggatggagttagcgatacctttttcgataccttctttcaggatcttggtgttggttacgaacaggtcgtcaccaaccagctggattttgtcgcccagaactttggtctggtatgcgaaaccgtcccagtcagattcgtccagaccgtcttcgatagaaacgatcgggtactgtttggtcagttcttccaggaagtgagtgaattcttcagaggtgaacgctttgttgccttcgccagccagaacgtatttaccatctttgtagaattcagaagctgcgcagtccatcgccaaagtgatgtctttgcccagttcataaccagcagctttaacagcttcagcgataacagccagagcttcagcgttggaacccaggttcggcgcatagccaccttcgtcaccaacagcagtgttcatgcctttcgctttcagaacttttgccaggtgatggaaaacttcagaacccatgcggatggcttctttcacagttttcgcgccaaccggctgaatcatgaattcctggatatcaacgttgttgtcagcgtgctcaccaccgttgatgatgttcatcatcggaaccggcatagagtatttgcccggagtaccgttcagttcagcgatgtgctcgtacagcggcatacctttagcagctgcagcagctttggcgttagccagagatacagccaggattgcgttcgcgccgaatttggatttgttttcggtgccgtccaggtcgatcatgatcttgtcaatgccagcctgatctttagcatctttgccaatcagcgcctgagcgatcgggccgtttaccgcagcaacagctttggttacgcctttacccaggaaacgggatttgtcgccatcgcgcagttccagagcttcacgggaaccagtagaagcacctgacggagcagctgccataccgacgaaaccaccctccagatgtacttcggcttcaacagtcgggttaccacgggagtcgatgatttcacgaccgatgatttttacgattttggacattaggttttcctcaagtcactagttaaactgaaactccagacaaacaacgcgtacccagggtacgcgttgccgctctaacttttttacttacttcgcctgacgtttctggaactcgctggcggctttcacaaagcctgcaaacagcgggtgaccatcacgtggagtagaagtaaactccggatggaactggcaagccacgaaccacgggtgattcggaacttcgatgatctcgaccaactgatcatccccggaacggcccgcaacgcgcagacctgcatcttcaatctgtttcaacagcatgttgttgacttcgtaacggtgacgatgacgctcaacaattgtcggcgcattgtacagctggcgaaccaggctatcgtcaaccaactggcactgctgtgcgccgagacgcatggtaccgccgagatcgctcttctcgctacgaacttcaacgttgccgttttcatcgcgccactcggtaatcagcgccacaaccgggtacttacagtctggcacaaattccgtagagttggcgttctccatgttggcaacatggcgagcgtaatcaattaacgccacctgcatacccaggcaaatgcccagataaggaatattgttctcacgcgcaaaacgcgcggtcgtaatcatgccttctacgccacgatagccgaaaccgccaggtacgaggattgcgtccagacctttaaggatttcaacgccgcgcgtttcaacatcttgtgaatcgatcagtttgatgttgacgctgacacgattcttcagcccaccgtgtttcagtgcttcgatcactgatttataagcatccggcagttcaatgtacttgccgaccataccgatggtgacttcacttaccgggttcgcttcttcgaagataacctgttcccattcggacagattcgcttccgggcagtttaagctgaatcgtttacaaatataatcgtccagcccctgagatttcaacaggcccggaattttatagatggaatcgacgtctttcagagaaataaccgctttttccggaacattacagaacaatgcaatcttcgcacgttcgttcgccggaacagcgcgatctgaacgacaaatcaggatgtcaggctggataccgatggagagcagctcttttacagagtgctgagtcggtttggttttgacttcaccagacgctgccatgtacggcaccagcgtcaggtgcataaacagagtgtgctcacggccaatttcaacagccatctggcgaatcgcttcgaggaacggcaaggattcgatatcacctactgtaccgccgatttctaccagtactacgtcatgaccttcgccaccttccagcacgcgctctttgattgcgttagtgatgtgcggaataacctgcacggttgcgccgaggtagtcaccgcggcgttctttacgcagaacgtcagagtagatacgacccgtggtgaagttgttgcggcggctcattttggtacgaatgaaacgctcgtagtgccccaggtccaggtcggtttcagcgccgtcttcagtaacgaacacttccccgtgttggattgggctcatagtacctggatcgacgttgatgtacggatccagtttcatgatggtcacattgaggccacgggcttcaagaatggctgcgagggaggctgcggcaatgcctttacccagagaggatacgaccccgccggtcacaaaaatatagttcgttgtcatgctgaacctgagaagttaggttgaaaagacgatggaataaccaagacgggaaagcagtatacccgaacatgacctgtgccacaaactttcattatccctcctcttcgccagcgcactattgaaatcaggagtgagaaaatagcccctttggggtaaatgtttttgacgcaaatcaagcgcttgtcatttaaaaaatgacacaaatggcgcttgaccgcgtaattcccttagagatcaatttcctgccgttttacctgttgccagacttcttccattgtttcgaggtcaacacctgtcatttccagtccacgcgcggcaacaatacgctccacttcgcgaaaacgacgctcgaatttttcgttcgctttttgcaatgcgatttctgctttcgtccctaaatggcgagccagattaaccgtggcaaacagcaggtcccccatttcctcctccagtttagcctggtcgacaacagcctgccgcgcttcgtacatcacctcgtcgatctcttcgtagactttatcgactaccggaccaagcgtcgtccaatcgaagccaacgttggcgcaacgtttctggattttttgcgcacgcattaaagccggtaaactacgaggaatatcgtccagcgccgaatgctgcgctttctgcgcgcgctcttcggttttgatttgctcccaacgggcaagcacttcactactgttttcggcagaactatcagcaaaaacatgcggatggcgacgctctaatttatcgctaatagcagcgcaaatatcattaaagtcaaagcgcccttcttcctgagccatttgcgcgtaaaacaccacctggaatagcagatcgcccagttcaccgcgaagatcgtcaaaatcttcacgggcgatggcgtccagcacttcgtaggtttcttcaagggtgtaaggcgcaatggtggcaaatgtctgctctttatcccacgggcagccgttttccggatcgcgcaggcgctgcataatagtgagcaaacggtcgatttgattcattgaattgtcctgaaaattgcgggtctgtcaggtggaaacctgtgaccagaatagaagtgagttagtaacactacccaatcagtacgttaattttggctttaatgagttgtaattcctctggggcaactgttcctttcttcgttgctcctcttgcccgccaggcgatactttttacctgatcagctaacgctacgccatcacgttcctgaccggataaaacaacttcgaacggatatccttttgattgcgttgtacaaggaacacacagacacatacctgttttgttgttgtacatgaaaggactcaggacaacagctggacgatgtccagcttgctcgctaccttttgtcgggtcaaaatcaacccaaatcagatcgcccatatcgggtacgtatcggcttaccattaccagacttccttatctttcggctctccccagtcgatattctcgtggaggttttccggcgtgatgtcgttgaccagttcagcaagcgtaaatacgggctctttacgcactggctcaataattaatttgccatccaccaggtcaatcttcacttcatcatcaatattcagattgagcgcctgcattaacgtagccgggatccgcaccgccggtgaatttccccaacgctttacgctactgtggatcataaccctttcctcaaaccgctatcatatgtagatacagtatatatcaatctacattgtagatacgagcaaatttcggcctaactcccgtgcaaccgacgcgcgtcgataacatccggcacctggttgagtttacccagcacgcgccccagcacttgcaggttgtaaatctcaatggtcatgtcgatggtcgccagttgctgtttggtgtcgctacggctggcaacgccaagcacgttcaccttctcgttggcgagaatggtcgtgatatcacgtaacaacccactacgatcattagctaccacgcggaccaccagcgaatatccggcggagtagctctcaccccataccgcgtcaacaatgcgttctggcgcatgggagcgcagttccgccagttgttcgcaatcggcgcggtgtactgaaataccgcgcccctgggtaatgaagccgacaatctcatctccaggaatcggctggcagcagcgcgcgatgtggtgcatcaggttgccaacaccttcgactaccacgcgaccgttatctttactgcggttttgcggcgtgtagcttttttgctgaagttgcttcagcgcggcggcgtcctgctcttcggcactcggcttattaaattgcgattgcaggaagttcaccatctgattgagacggatatccccgccaccaatcgccgccagcaactcgtcgacatcattgaagttgtaacgcggcagcagatgtttttctgcttctttcaggctgatccccagatgttccagctcgtcgtcaaggatttgccgcccagccagaatgtttttgtcacggtcctgtttacggaaccaggcgtgaattttcgaacgcccacggctggttgtgacgtaaccgaggtttgggtttaaccagtcacggctggggttcggctgtttctgggtgataatttcaatctggtcgcccatctgcagctggtaggtgaacggcacaatgcgcccgccaatttttgccccgatgcagcggtgtccgacatcactgtggatgtggtaagcgaagtccagcggcgttgatcccgcaggcaaatcaacgacatcacctttcggcgtaaagacgtacacccggtcgtcaaagacctgactacgtacttcgtcgagcatttcgccggaatcagccatctcttcctgccacgcaatcagtttacgcagccaggcaatccggtcttcatgtcccgaacgtgcgccgccagcagccgcgccctctttatatttccagtgcgcagcaacacccaactctgcatcttcatgcatctgtttggtgcggatttggatctcaacggtttttccacccggccccagaaccacggtatgaatagactgataaccgtttggtttcgggttagcgacgtaatcgtcaaactcatccggcaggtggcgatagtgagtgtgcactatccccagtgcggcatagcaatcctgtaaacgctcggcgacaatacgtaccgcacgcacatcaaacagctcatcaaaggcgaggttctttttctgcattttacgccagatgctgtagatgtgtttcggacgaccatacacttccgctttaacgccttcagctttcatctcagcgcgcagatgaccaacgaactcttcgatgtagtgttcgcggtcgagacgccgttcatgcagcagtttggcaattcgtttgtattcggttggatggaggtaacggaagcagtaatcttccagttcccatttcagttgtccgattccgagacggttagccagcggtgcgtagatgttggtacactcttttgccgccagtacacgttcatcttccggcgcatcttttacttcgcgcagatgagcaatacgctccgccagtttgatgactacgcagcgaaaatcatcgaccatcgccaataacatccggcgaacgttatcgacctgttcggaggaaacagaatcagtgtgcgtcgctttcagctggcggatcgccgccatatcacgcacgccgtgaataaggttaacgaccgacttaccgacgctctcacgcagcacatcttcgctgactacgttggcatccgccagagggaaaagcagcgccgcccgcagcgtgtcaatgtccatacttaatgtcgagaggatctccaccatctcaacaccacgccacaataacagactggcatccggatgcccctgcgtctgttgcagacaatacgcccaggtttcggctaagcactcacacgacttctggctggtaatacccagacttgcgatccatttttccggatcaaattcaccagccttattgatatgtgcacttcttaccgcaaccatcgtcctctcctttagggaccagacctgccgaaatcggcaaatcgcaactatttaacgcgcgagaaaagtaccatcgattccagatgtcccgtgtgtgggaacatatccagcatcgccagtcgcgcaatggtatatcctgcttttaataacgcttcgctatcccgagccagcgttgcagggttacaggatacataaactatacgaataggttccagttttataatttgctgcataacacctgcggcacctgctcgcgccgggtccagcaacactttatcgaagccgtttttcgcccacggctgctttgtgacatcttcttcaagattttcgtgataaaacgtcacattctgtaagccattaagacgcgcattctgctggcctttttccaccagcgccggaacaccttctacaccgaccacactggcagcttgtgtcgccaatggcagtgtaaagttgcccataccgcagaacagatccagtacgcgatcttcaggttgcacatccagccattccaacgcacgcgctaccattttttggttcacacccgcattgacctgaataaaatcgcgcgggctaaaagttaagcgcaacccgtttgagtcataccagggcatctcaccagagacggtttcgagtatctcactatcgggggcgagatacagatccaggccttcagaatgcgaaaagcgttccagtttttcgcgatctgccgaacttagcggtgcggtatggcgcaaaatcatcagcgtgccgctggttgcctgtaccagttcaacatgaccaagatggcgcatagcttgtaagctgcccagacatgccctgactttgggcagcaatgcttcaagttggggcgctaaaatggggcattgtttgacgtcgacaatgtcactggagcccgctttgcgaaaccccatctgaagttgctgtgttttcggtaagtagttcagacttaaacgcgcgcgacggcgatagccccagggaacatcggcgatcacttcagagacatcgtgtttcattaatcgggcgagtgccgcacttttgcttcgctgctgtaaatccacgctggcgtgttgttgctgacagccaccgcatacgccaaaatgaggacagcgtggcgtttcgcgttccgggctatcgcttaaccggcgtacgactttagcgcgggcatactgttttttatcttcagtaacagtaacttccgcgttttcctgcggcaataatccggggataaatagcgttttgccgttatgtcgcgccacgccctgaccaaaagagtcgaggtcgttgactgaaacggttatgatctgacgcgtcgtcgtgcgtcgttttgcagagtagaattgcgccattggcgagactttctcaatttaacagtgtgaccttaattgtcccataacggaactccatgaccaactacagcctgcgcgcacgcatgatgattctgatcctggcaccgaccgtccttattggtttattgctgagtatctttttcgtcgtgcatcgctataacgacttgcagcgtcaactggaagatgccggtgccagcattattgagccgcttgcagtttctactgaatatggcatgagcctgcaaaatcgcgaatctatcggtcagttaataagcgtactgcatcgtcgccattccgatattgttcgcgcgatttcggtttatgatgaaaataaccgactctttgtcacctccaattttcatcttgatccctcatcaatgcagctcggcagcaacgtgccgtttcctcgccagctcactgtcactcgtgacggcgatattatgatcctccgcacgccgattatttctgagagttactcccccgacgaatcgcccagtagcgatgccaaaaatagtcaaaatatgttgggatatattgcgctggagctggatcttaaatcggttcgcttgcagcaatataaagagatctttatttccagcgtgatgatgctgttttgtatcggtattgcgcttatttttggctggcgcttaatgcgcgatgtaaccggtccgattcgcaacatggtgaataccgtcgaccgcatccgtcgcgggcaactcgacagccgggtggaaggatttatgctcggcgagctggatatgctgaaaaacggtatcaactcgatggcaatgtcgctggctgcttatcacgaagagatgcagcacaatatcgaccaggcgacgtccgatctgcgtgaaacgctggagcagatggaaattcagaacgttgagttagatctggcgaaaaagcgcgcccaggaagcggcgcgtattaaatccgagtttctggcaaatatgtcacacgagctgcgtacaccactgaatggtgttattggctttacccgcctgacgctgaaaacagaattaacaccaacgcagcgcgatcacctgaatacgattgaacgttcggcaaataatttgctggcaattattaatgatgttctcgacttctcgaaactggaagcaggtaagctgattctggaaagtattccattcccactacgcagcacgctggatgaagtcgttactctgctggcacattcttctcacgataaagggttagaactgacgctcaatattaaaagcgacgtgcctgataacgtgatcggcgacccgctgcgattacagcaaatcatcactaacctggtggggaatgcaattaaattcaccgagaatggcaacattgatattctggtagaaaaacgtgcgctgagtaataccaaagtgcagattgaagtgcagattcgggataccggcattggtattcctgaacgcgatcaatcgcgcttattccaggccttccgacaggctgatgccagtatttcccgccgtcatggtggcaccgggctggggctggtgattacacaaaaactggttaatgaaatgggcggcgatatttcgttccatagccagccgaatcgcggttcaactttctggttccacattaatctcgatctgaacccgaacattattatcgaagggccatccacccagtgcctcgcaggtaagcgcctggcctatgtcgaaccaaactccgcagcagcgcaatgcacgctggatattttaagtgaaacgccgctggaagtggtttatagcccaacgttctccgcgctgcctcccgcgcattacgacatgatgttgttaggcatcgcggtgaccttccgcgagccgctaacaatgcaacatgagcgattagcgaaagcggtatcgatgaccgatttcctgatgctggcacttccttgccatgcacaagtcaatgctgaaaaactcaagcaagatggtatcggcgcgtgtctgctgaaaccattaacacctacacgcctgttgcctgccctgacggaattttgtcatcacaaacaaaacacgcttttgcctgtaaccgatgaaagtaagctggcaatgacagtcatggcggttgatgacaaccccgctaacctgaaacttatcggcgcattgctggaagatatggtgcaacatgtggaactttgcgatagcgggcatcaggcggttgaacgggcgaaacagatgccgttcgatttgatcttaatggatattcaaatgccggacatggatggcattcgggcctgcgaactcatccaccaactcccgcatcagcaacaaacgccggttatcgcggtaacggcgcatgcaatggccgggcaaaaagagaagctgcttggcgcagggatgagcgattatctggcgaaaccgattgaagaagagcgattgcataatttgttgttgcgctacaagcctggcagcggtatttcctctcgcgtcgtgacgcccgaagtcaacgaaattgtggtgaacccgaatgcgaccctcgactggcaactggcactacgccaggcagcaggaaaaaccgatttagcgcgcgatatgctgcaaatgttactcgatttcctgcctgaagttcgcaacaaagttgaggaacagctggttggagaaaacccggaaggcctggttgatttgattcataaactgcatggcagttgcggctatagcggtgtgccacgtatgaagaatctctgccaactgatcgaacaacagctacgtagcggtactaaagaagaagatttggaaccggagctgctggaactgttggacgagatggataatgtcgcgcgcgaagccagcaaaattctcgggtaatggatgtcttgtcgagtagcaatcggctttttatgacgctggtttcagattggtgacaaagtgcctgtgtttatgccggatgcggcgttaacgccttatccggcctacaaaaccaattaaattcaatgaattaaaaaatgatgtagacctgatacatagcacaacaggctattttgcgtttagcatcagtctcaaaccggctccagatagagccggttttggttttctgtcttaacgcaccatgcacgggcgcttgttatcgaacgtccagccaggaatcagatactgcattcccatcgcatcgtcacgcgcgccaagcccgtgtttctgatacagctcatgggctttcatcacttgatccatatcgatttctacacccagccccggtttttctggcacctgtaccagcccgcctttgatctcaaacggttctttggtcaggcgctgattgccttcctgccaaatccagtgcgtatcaatagcagtaattttacccggtgcagcggcggcaacatgggtaaacatcgccagggaaatatcgaagtggttgttagagtgtgaaccccaggtcaggccaaattcatggcacatttgcgccacacgtaccgaaccttgcattgtccagaaatgcggatccgccagcgggatatcaacggattgcagggagagcgtatggcccatttgccgccagtcggtggcgatcatattggttgcagtcggtagacctgtcgcgcgacggaactctgccatcacttcacgcccggagaaaccttgctccgcaccacacggatcttctgcataagccagcgaacctttcaggtatttaccgattttaatcgcttcgttcagcgaccaggcaccgttaggatcgagcgtaatacgcgcctgcgggaagcgttgcgccagtgccacaatagactcggcctcttcttccccggccagtacaccgcccttcagtttgaaatcgttgaagccatatttttcatatgccgcttccgccaggcgcaccaccgcatccggcgtcatcgcttcttcatgacgcaggcgataccagtcgcatgagtcatccggctggctttgatacggcagcggcgtggctttgcgattaccgacgaagaacagataaccgagcatttcgacttcgctacgctgttgaccatcgcccagcagcgatgccacgtttacccccagatgctgccccagcagatccagcattgccgcttctatcccggtaactacatgaatagtggtacgtaggtcaaatgtctgcaaaccgcgcccaccagcatcacgatcggcaaaagtattacgcaccagcgtcagaacgtttttgtattcacccagcgttttacctaccaccagcggaatcgcatcttccagcgttttacggattttctcgccgccgggaatttcccctacgccagtgtgaccagaattatctttgataatcacaatattacgcgtaaagaacggtgcgtgtgcaccactcagattcatcagcatactgtcatgacccgccaccgggataacctgcatttcagtaacaacaggcgtcgtaaattgagaactcatatttatgtcctttttcagaatcaatgacggccgaaaacgggacgtttacggtcaaaggtccagccggggatcaggtactgcatcggacctgcgtcgttacgcgcaccgccaggcagacgtttataggcctcatgtgccttttgtacctgttcccagtccagttccacgcccagaccgggcgcatcaggaacggcaatttttccgtttttaatctccagcggattttgggtcaggcgacaatcgccctcctgccaaatccagtgggtatcgatagcggtaggattacccggtgccgccgcgcccacatgggtaaacatcgccagagagatatcgaaatggttattagaatggcagccccaggtcagcccccagtcgtcgcaaagctgcgccacacggactgcaccggaaagcgtccagaagtgcggatcggcaagtggaatatctaccgcattgagcatcaccgcatgacccatttcgcgccagttggtggcgatcatgttagtcgcgacgggcaagccggtcgcccgtcgaaattccgccatcacttcacgtccggagaagccctgttctgcgccgcatggatcttcggcataggtaagaacatcattcagccctttgcataaagaaatggcttcatcaagcagccatgcaccgttgggatcaacggtaatccgcgcatccgggaagcgtttcttcaatgcacgaacagtgtcgatttcttgctcgccaggtaacacgccgcccttaagtttgaaatctttaaagccgtagcgatcctgtgaggcttccgccagacgcacaacggcttcgctgttcattgctttctgatgccgcaactgataccactcatggttgcccggcgtattttccacataaggaagatcggttttggtccgatcaccgatataaaacagataaccgaggacggtaatagcctcgcgttgcttgcctggccctaacagttcgcagaccggaacattcagcgccttacctagcaggtcaagcaaagcggcttccagcgccgccacggcgttaacgcgtaattcaaaggtccaggcacctttaccgaaggtatcaaaatcggcggcctgattacctttatgcacctgctggaccactttattcagtcgcgcaacttcctggcccagaaccatcggaatagcatcgacaagcgtctgataaatcacatctccgcccggcgcttcaccaatgccggtatgcccggcgttatcggtgagtaccacaatattgcgggtgaaatatgcgttatgtgccccaccaatattaagcaacatgctgtcatgcccggccaccggaatgactttcatatcagtaataacaggactggattgtgtcgccatcttattgccccgcaacaggtttcaactcgatacgcttgatatcgcccaccagcaccaggtagctcagtaccgcgattaaggcatgaacaccaacataaatcagcgccccattaaacgagccagtcgtgccaacgatataaccaattgcgattggcgtgacgatgccagaaatgttaccgaacatgttgaacaggccaccggaaagaccgctgatctcttttggcgcggtatctgccattactgcccaacccagcgccccgatgcccttaccgaagaaggccagcgccataaagccgatgatcatccactcaacgttgacgtagttgcagaacaccatcaccatcgacagcaacatgcccattacgatcggtgttttacgcgcaatgttcagcgatcccgtgcggcgcatcagccagtcggaaataatcccacccagcacaccgccgataaaaccgcaaaccgccggaacggaagccacaaagcccgctttcagaatcgacatcccgcgtgcctgcaccagataaaccgggaaccaggtaataaagaagtaagtcagggcgttgatacagtactgaccgatataaacgccgatcatcatccgtgaccctagcagctgtttgatctgcccccacttcacgctgaacggcactttaactttggtgttttgctgatccatattgatcagcgcaccacccgcggcgatgtactccagctctttcttatttacccccggatgttgatttggctcgtggatgactttcaaccagataaagctgatgacaatccccagaccgcccataaagaagaagacgtgtgaccagcccacttcatgcgtcagccagcccataatcggcgcgaagatcaccgttgcgaagtattgagcggagttaaaaatcgacaccgccgttcccctttcctgcgccggaaaccaggccgcaacaatgcgactgttgccggggaaagatggcgcttcagcaagcccgaccaggaagcgcagcgtaaacagggcaacgataatgccgaatccactaaagatatcgacgaagccttgcagcaaggtaaacatcgaccagataaagatcgaccagaagtagacgcgttttgaaccaaaacggtccagcaaccagccaccagggatctgcccgataacataagcccatgagaaagcagagaacacatagcccattcccacgggatcaaggccgatatctttggccatttccgaaccggcgatagagagcgtagcgcggtcgccgtagttgaaggatgtgacgataaacaacatcaccactatccagtaacgagcatttgtgcgtttttccacactgctcgcagcctgacttaaagaactcattgttgcactcctgaaaattcgcgttagccacgctcactctggactgcgacatcgccaggaaatcagaggtgacgtagggtgttttttgccgtttttataggtcgttcgccgaatacggcgcgtgtttatatctggcaatagcagtataaaaagcgcgccatagcggctcaccgtgcaacaacacaacattaatgcgttcaatgaggcccgattttggcattagccctggacggtggaatccacttcacggaaatgaaaacaagaacaagaaaggaagggttaaaacgaagaaataaagaagagtatgaaatggatcgcttgactccaggcaaacgccagtaaaaatccgcgctatgaagcagtttttactggcatttgcctgaaaagattcgattcagcaccgctaaaacgacatttaccgctcgctgaacatatcaggacaacagcgtgccccactgttcgacccacggatttgattccgtttccggttccgggttctcactggcgtcaatcaacagcatttcgccaacccgctgagcgctctgttcctgcaacaaggcatcgaactgtttgccgccattgcagaaattcacataactactgtcgccgagcgcaatcacgccataacgcagattcggctggaagcccagactatctttgattccctgaaagagtggcacaatgctatcaggaaggtcgccctgcccggtcgtggacgtaaccaccagaacatacttatcctgatagggcagccagtcgcttaattcaggatcttcaaataccgttgctttgtggccctgcgcggtcagaatcgcttccgcttcttcggccactaacagtgaattcccgtacatggtgccgacaaaaataccaatttccgccataccgttttctccctggattaggaacttatctctccatcctgacccgatggcgcactgaactcaaccctttcattttcaggaagcagaccgcgccagccaaattgtgataacgcctgcatccaggtgtcgtccaggcccgcgtgaatagtcagcggctcgccagtaaaaggatgcgtcaatgacaactgactggcatgtagcattaaccgctggaggccaaaatgctcagcaccgctgcgattctggcgtaaatcgccatgtttgctatcgccaataatcggatgacgcaaatgggcaagatgtcggcgaagctgatgtttgcgtccggttttcggctccagttccaccaggccgtagcgcgtggtcgggtaacgtccggtcgctaccggcatttctacggtcgccagaccgcgataatgcgtcactgctggctgcgggcctttatcttcgcgggcaaatttatcagcgattttgtccagttcttccaccagtggataatccagcaccgcttcttccatcaaccagccgcgcacaatcgcatggtaacgtttctggatttggtgctgttcaaactgttgtgccagcagccgtccggcctcgctggataatcccatcaacaacacaccagaagtgggtcggtccagacgatgagcagtaaaaacatgctggcctatctggtcacgcacggtttgcatgaccactactttctcgtcgcgatccagccagctgcggtgaaccagccagccggagggtttatttaccgcaaccagccattcatcctgatagagtatttccagcattagctcgcatcatccgcaaaaagagcatccagtttttccagctcagccagaataagcgcgcgttgcggatggtccgtcgccagcgccatttcataatagggtgcaacggcaaaagcgcccggtaacggctgtttgttatctaacaaatcgtgcattcgcgggatcagcacccactgcaaccactccagtggttccatggtgtccataaagaacggttgggtactattaaattgatgcggctggggttcatcgtttcgccagtgctgatgttcacgcagtaacgcttcaagcgcctgcaactggagacgaacgcggtcatgagtggtcataaagcaacctcaataagaaaaactgccgcgaaggatagcaggaataaaaaaagggagcactgtattcacagcgctcccggttcgtttcgcagcattccagctacttttgttgctccctgctcatccttgacaacttttcctctggccttgcggccaatcgttcatcctgaactattgcttcctgctcacaccaccccgatgtgatacttcatcctgaagtgtccctggccttcctgacccaccgaatcatcctgaccggttctcattctccatcctggaggtgtcctttaacgcgtcctgcgtcatcctcttcgcttcatccagaagcctttccctgaaacaccatcctggtgtgtcctgcagaagtgtcatcatcctgatgttcacttcgttgtctgactccctgtcgacgaagatagaatcgtctttttcgcgaagtcttacaaggcgcttacagacaatgccttaaggaaaatttcatatgaaagttaagaattaacaatcaacattttgattttaaatgaaaataacgattcttatctttttaagtattcgcttatttcctggcgatctcctacagagtctgtaagagatctctcacaaccagatggggtatttggattacagaagaggcttaagttgattaaggaattccgcaagatttgaggctaaatgcgtccgtttacgtgttcccagcgtctctttgcacacttcaccggagagattacacaccgagatgacctctaactcttcttccagcgtcgcgataaatagtgtgggcggcagttttagccttttctgagtcaccagatgaccaatcagattttcctgcacccgacggaagtcgtcttcactccaggtttgcagcaatgtcagtttgatatcgccaaactgcgcgtgcatatccccggcaaactgagtcgtataaaaggtatgaattgtgggttgtatcacaatatcaaaagcgcgttcaaccgcgtttacattttgttccccggtaaacggctggggttgccagtatacggcatcttcggtagttgaaataatgcacggtgaaggaacaccgtacagttcctcacttaacggccagcttttatgctcttcatgccacgcatcgcagtagcgtgcagtaaaatctttcagggcttgtgcggtcaaatcgtccactaatttctctcttcacttaaaccagatacacttgtcgtttagtttatctggtttatgacggtgaaacatgtcttcttatgcaaaccatcaggcacttgcgggcctgactcttggaaaatcaaccgattaccgggatacctatgacgccagcctactgcaaggcgttccacgcagcctgaatcgcgacccgctgggtctgaaagcggataacctgccttttcacggtacggatatctggacgctgtatgaactttcctggctgaatgcgaaaggtttgccgcaggtcgctgtcggtcatgttgaacttgattacaccagcgtaaatctgattgagtcgaagagttttaagctctatctcaacagttttaaccagacgcgttttaataactgggatgaggtgcgccagacgctggagcgcgacttaagcacttgcgctcagggtaagattagcgtggcgttatatcgtcttgatgaactggaaggccagccgataggtcattttaatggcacttgcattgatgaccaggatatcactatcgataactatgaattcactactgactatctggagaatgccacctgtggtgaaaaagtagtggaagagacgcttgtcagccacctgctgaaatcaaactgcctgatcacccatcaaccagattggggttcgctccaaattcagtatcgtggacgccaaattgacagagaaaaactgctgcgttacctggtctcattccgtcatcacaacgagttccacgaacagtgcgtggaacgcatctttaatgacctgttacgcttctgccagccagaaaaattgagcgtttacgcacgttatacccgtcgtggcggtctggacattaacccgtggcgcagtaatagcgattttgtcccatcgaccacaagactggttcggcaataaattttttctcaattttgcgtgctggattcacgcagaaggttgtgaaaggtcatcaggcagggctattgtaatcaaagggaatgacgatattcgtcccataaggagtttttcttgattacacatattagcccgcttggctccatggatatgttgtcgcagctggaagtggatatgcttaaacgcaccgccagcagcgacctctatcaactgtttcgcaactgttcacttgccgtactgaactccggtagtttgaccgataacagcaaagaattgctgtctcgttttgaaaatttcgatattaacgtcttgcgccgtgaacgcggcgtaaagctggaactgattaatcccccggaagaggcttttgtcgatgggcgaattattcgcgctttgcaggccaacttgttcgcggtcctgcgtgacattctcttcgtttacgggcaaatccataacaccgttcgttttcccaacctgaatctcgacaactccgtccacatcactaacctggtcttttccatcttgcgtaacgctcgcgcgctgcatgtgggtgaagcgccaaatatggtggtctgctggggcggtcactcaattaacgaaaacgagtatttgtatgcccgtcgcgtcggaaaccagctgggcctgcgtgagctgaatatctgcaccggctgtggtccgggagcgatggaagcgccgatgaaaggtgctgcggtcggacacgcgcagcagcgttacaaagacagtcgttttattggtatgacagagccgtcgattatcgccgctgaaccgcctaacccgctggtcaacgaattgatcatcatgccagatatcgaaaaacgtctggaagcgtttgtccgtatcgctcacggtatcattatcttccctggcggtgtgggtacggcagaagagttgctctatttgctgggaattttaatgaacccggccaacaaagatcaggttttaccattgatcctcaccggcccgaaagagagcgccgactacttccgcgtactggacgagtttgtcgtgcatacgctgggtgaaaacgcgcgccgccattaccgcatcatcattgatgacgccgctgaagtcgctcgtcagatgaaaaaatcgatgccgctggtgaaagaaaatcgccgtgatacaggcgatgcctacagctttaactggtcaatgcgcattgcgccagatttgcaaatgccgtttgagccgtctcacgagaatatggctaatctgaagctttacccggatcaacctgttgaagtgctggctgccgacctgcgccgtgcgttctccggtattgtggcgggtaacgtaaaagaagtcggtattcgcgccattgaagagtttggtccttacaaaatcaacggcgataaagagattatgcgtcgtatggacgacctgctacagggttttgttgcccagcatcgtatgaagttgccaggctcagcctacatcccttgctacgaaatctgcacgtaatctccgctcccccggtgacgtttgttgccgggttttctcgtttttggtcacttactcatcaactcatttcatttgttatatgaatgtttcttaccaccctcacgcgacaaatatcatcacagttaatatgtcatacaatttatgttgcaacgcaaacgtttccctattttcataaaccgtattttatcgctatgaaaaagaaattatcgccatgattaactaaaagtattgattttttcagttcaacctacatatattgcgcgccccggaagaagtcagatgtcgtttaatgggcaaatattgcccttaaattctcttttacttttgatttacagagtaaagcgttgggataatctatcttccaagtagattattgtatttgagatcaagatcactgatagatacataacttgtgtgtatctttccgccctcaaattattacggcggtaaatgattaagccatcgccgatagacagatttcatttttacggtcaggcaccttcccgggctgaactggctaaaagctgaattatttgcattcctccaggagaaatagatggaaacgactcaaaccagcacgattgcgtcgaaagactctcgtagtgcctggcgcaagacagacaccatgtggatgctgggcctttacggcacggcaatcggcgcgggcgtgctgttcctgccaatcaacgccggtgttggcggtatgatcccgctgatcatcatggctatccttgcgttcccgatgacgttttttgctcaccgcggcctgactcgcttcgtactgtctggtaaaaacccgggcgaagacatcaccgaggttgtagaagaacactttggtattggcgcaggtaaactgattaccctgctctacttcttcgctatctacccgatcctgctggtttatagcgtggcaatcaccaataccgttgaaagcttcatgtctcaccagctgggtatgacgccaccgccgcgtgcgattctgtcgctgatcctgatcgtgggtatgatgaccatcgttcgcttcggtgagcagatgatcgttaaagcgatgagtattctggtattcccgtttgttggcgtactgatgctgctggctctgtacctgatcccgcagtggaacggcgctgcactggaaacgctgtctctggacactgcatctgcaaccggaaacggtctgtggatgaccctgtggctggcaattccggtaatggtgttctcgttcaaccactctccgatcatctcttctttcgccgttgcgaagcgtgaagagtacggcgatatggcagaacagaaatgctcgaagatcctggcattcgcacacatcatgatggtgctgaccgtaatgttcttcgtcttcagctgtgtactgagcctgactccggcagacctggctgcggctaaagagcagaacatctcgattctgtcttacctggctaaccactttaacgcaccggttatcgcgtggatggctccgattatcgcgattatcgctatcaccaaatccttcctcggtcactacctgggcgcacgtgaaggcttcaacggtatggtgattaaatctctgcgtggtaaaggtaagtctatcgaaatcaacaagctgaaccgtatcactgcgctgttcatgctggtaacgacctggattgttgccaccctgaacccgagcatcctgggtatgattgaaaccctgggcggtccaatcatcgcgatgatcctgttcctgatgccgatgtacgcaattcagaaagtaccggcaatgcgtaagtacagcggtcacatcagcaacgtattcgttgtcgtgatgggtctgattgcaatctccgcaatcttctactctctgttcagctaagtcctttcgcgccgctttcgggcggcgcttcctccgttttaacgcgatgtatttcctatgattagcgtattcgatattttcaaaatcggcattggcccttccagttctcataccgttggaccaatgaaagcgggtaaacaatttaccgacgatctgattgcccgtaacctgcttaaagacgtgacccgcgtggtggttgacgtgtacggctcgctctctctgaccggtaaaggccaccacactgatatcgccattattatgggcctggcgggtaacctgccggataccgtggatatcgattccatccccagttttattcaggatgtgaatactcatggtcgcctgatgctggcaaacggtcagcatgaagtggagttcccggttgatcagtgcatgaacttccacgccgacaacctttctctgcatgaaaacggtatgcgcattaccgcgctggcgggcgataaagtcgtttacagccagacttactactctattggcggtggctttatcgttgatgaagagcattttggccagcaggatagcgcaccggttgaagttccttatccgtacagttcagcagccgatctgcaaaaacattgtcaggaaaccgggctgtcactctctggcctgatgatgaaaaacgagctggcgctgcacagcaaagaagagctggaacagcacctggcgaacgtctgggaagtcatgcgcggcggtattgagcgcggtatttccaccgaaggcgtgttgcctggcaaactgcgcgttccacgccgtgctgcggcactacgccggatgctggtcagccaggataaaaccaccactgacccgatggcggttgttgactggatcaacatgtttgcactggcagtgaacgaagagaacgctgctggcggtcgcgtggtgactgcgccgactaacggtgcgtgcgggattatcccggcagttctggcgtactacgacaagtttatccgcgaagtgaacgctaactcactggctcgttacctgctggtagccagcgccattggttctctttataagatgaacgcgtcgatttctggtgctgaagtgggttgccagggtgaagttggcgtggcgtgctcaatggcggcggctggtctggcagaactattaggcgcaagcccggcgcaggtgtgcatcgcggcggaaatcgccatggagcacaacctcggtctgacgtgtgacccggtcgccggacaggtacaggtgccatgcatcgagcgtaacgccattgcggcagtaaaagcggtgaacgccgcacgtatggcgctgcgccgtaccagcgagccgcgcgtctgcctcgataaagttatcgaaaccatgtacgaaacaggtaaagatatgaacgccaagtaccgcgaaacctctcgcggcggcctggcaatgaagatcgttgcctgcgattaatcgctctccaaaggcctcgttttgcgaggcctcttcccgatttctcatccagccgtagcctgttccggcatcgaatgttacccttatcgcctgatctttaagggggttatcgtggctgttcatttgcttattgtcgatgcactgaatcttattcgtcgcattcatgccgttcaggggtcgccctgtgtcgaaacctgccagcatgcgctcgatcagctcattatgcacagccagccaacccacgcggtcgccgtttttgatgatgaaaaccgcagtagcggctggcgtcatcagcgtttaccagattacaaagcgggtcgaccgccaatgccggaagagttgcacgacgagatgcctgcattacgcgccgcctttgagcaacgcggcgtcccgtgctggtcaaccagcggcaacgaagccgatgacttagccgccacgctggcggtcaaagtgacacaggccgggcatcaggcaacgattgtttcgacagataaaggctactgtcagttactttcaccgacattacgtattcgtgattacttccagaaacgttggctggatgcgccatttatcgataaagaatttggcgttcaaccgcagcagttgcccgattactggggacttgcggggatcagcagttcaaaggtaccgggtgttgcgggaatcggaccaaaaagcgccacgcagctgctggtcgagtttcagagtctggaagggatatatgagaatctggatgcggttgccgaaaagtggcgcaaaaaattagaaacccataaagagatggcgtttctgtgccgcgatattgcccgcttacaaaccgatttgcatatcgacggcaatttacagcaattgcggttggtacggtaacggcgagccggatacgccgcaaacgtcgtatccggcattatcacatcagcgcatttaccaggcggtatggtaaagctctacaatatcctcaagcgttgcttcacgcgggttgccaccggtacaaacatcatccagtgccgcctgcgccagtgccggaatgtcttccttgcgtacaccaacatcacgcaaatgtggcggaataccgacatcacggttgagagcaaacaccgcttcaacagcggcattacgcgcctcttccaggctcataccttccactttcacgcccataacgcgcgcgatatcgcggtacttctcaccggtaaagtcagcgttataacgcatgacatgcggtaacaggatggcgttcgcaacaccgtgtggagtgttataaaacgcgcccagtggatgcgccataccatgcaccaaccctaacccaacattcgagaagcccatacccgcaacatactgcccgagcgccatttcttctccggcatccttatcaccagcaaccgatcctcgcagcgccccagcaatgatttcaatcgctttaatgtgcagtgcatcggttagcgcccacgcgccacgggtaatatacccctcaatagcatgagtgagcgcatcgacacccgtcgcagctttcagcgctggaggcataccatccatcatgtcagcgtcaataaacgccacctgcgggatatcatgcggatcaacgcaaacaaacttgcgccgtttctcttcgtcagtgatcacgtagttaatggtcacttctgccgcagtacctgctgtggtaggaattgccagaatcggtacactgggtttattggtcggggaaagcccttccaggctacgcacatcggcaaactccgggttgttgctgataatgccaatcgctttacaagtatcctgtggagaaccaccaccaatagcgatcaggtaatccgcgccgctattctggaatacaccgagcccttctttgacgacagtaattgttgggttgggcactacgccgtcgtaaatcgcccatgccagccctgcagcatccatcttatcggtcactttcgccaccacgccgcattgcaccagcgttttatcggtgacgatcagcgccttctgataaccacggcgtttcacctcatcggttaaagccccaacagcaccccgaccaaaccatgccgtttcgttcagaatcattctgttagccatcatccttctccttgttgctttacgaaattactcttcaattcgtaacccataggttttgaatttctccagcactacggcaatctcttcatcgctcagcactggcaccgggtccgtaatcgccagggtcgtcaggtaaagttgcgccagcacttcaacttcatgcgccagccataacgctttttccagattcacctcacaagcgataagcccatgatgttgtaacaaagttgccttacgatttttgagagccagcgcaacatgttcagaaagttcgcgtgttccaaaggtcgcataaggcgcgcaaggaatagaattaccgccagccgccgcaatcatgtagtgaatagcggggatcgatcggttaagaatggaaactgccgtgcaatgaacggcatgattgtgaacaaccgcgttggcatccggtctgctttgataggctgccatatggaaacgccattcgcttgaggggagctttccttcctcatgtttaccgttgccatcaataaagacaatatgcgactccgtcagtttttcatatggaatgcctgtaggcgtaatcagcatcccatcctgataacgtacactgacgttccccgctgtcccctggttcagtcccaggcgggtcatttccaggcaagtgtcaataatctgacgagcaagtttatttcgttccattagctacctctctctgattcaaaacagggcaataatgttgttcctttcacactattgaattagccgtttaattacccaccatcttcttcctgattaacaagaaagaaattcacaagcttatattttgtgacctggttcaactaatcacagtaaataactgcaagttctctttttataaccccattaaaaatgaccgctcttaaaaatatttatcaaaacggtcatttttctattcctccaagcccggaatgaccgttttcggcacaaacaattaatacggtcatctgatttgtgttttttatgatttattttctgaaacgggcatgaaatttcgattattaaagtgatggtagtcacataaagtcaccttctagctaataagtgtgaccgccgtcatattacagagcgttttttatttgaaaatgaatccatgagttcatttcagacaggcaaatattcactgatatgaagcccgaactcgctggttttgcacttttgaaaacataaccgattacgtgcttaagcttctgaacctaagaggatgctatgggaaacacatcaatacaaacgcagagttaccgtgcggtagataaagatgcagggcaaagcagaagttacattattccattcgcgctgctgtgctcactgttttttctttgggcggtagccaataaccttaacgacattttattacctcaattccagcaggcttttacgctgacaaatttccaggctggcctgatccaatcggccttttactttggttatttcattatcccaatccctgctgggatattgatgaaaaaactcagttataaagcagggattattaccgggttatttttatatgccttgggtgctgcattattctggcccgccgcagaaataatgaactacaccttgtttttagttggcctatttattattgcagccggattaggttgtctggaaactgccgcaaacccttttgttacggtattagggccggaaagtagtggtcacttccgcttaaatcttgcgcaaacatttaactcgtttggcgcaattatcgcggttgtctttgggcaaagtcttattttgtctaacgtgccacatcaatcgcaagacgttctcgataaaatgtctccagagcaattgagtgcgtataaacacagcctggtattatcggtacagacaccttatatgatcatcgtggctatcgtgttactggtcgccctgctgatcatgctgacgaaattcccggcattgcagagtgataatcacagtgacgccaaacaaggatcgttctccgcatcgctttctcgcctggcgcgtattcgccactggcgctgggcggtattagcgcaattctgctatgtcggcgcacaaacggcctgctggagctatttgattcgctacgctgtagaagaaattccaggtatgactgcaggctttgccgctaactatttaaccggaaccatggtgtgcttctttattggtcgtttcaccggtacctggctcatcagtcgcttcgcaccacacaaagtcctggccgcctacgcattaatcgctatggcactgtgcctgatctcagccttcgctggcggtcatgtgggcttaatagccctgactttatgcagcgcctttatgtcgattcagtacccaacaatcttctcgctgggcattaagaatctcggccaggacaccaaatatggttcgtccttcatcgttatgaccattattggcggcggtattgtcactccggtcatgggttttgtcagtgacgcggcgggcaacatccccactgctgaactgatccccgcactctgcttcgcggtcatctttatctttgcccgtttccgttctcaaacggcaactaactgaacatattttccgaataaagtgaggaatctgtaatgaaaaaaatcagcttaccgaaaattggtatccgcccggttattgacggtcgtcgcatgggtgttcgtgagtcgcttgaagaacaaacaatgaatatggcgaaagctacggccgcactgctgaccgagaaactgcgccatgcctgcggagctgccgtcgagtgtgtcatttccgatacctgtatcgcgggtatggctgaagccgctgcttgcgaagaaaaattcagcagtcagaatgtaggcctcaccattacggtaacgccttgctggtgctatggcagtgaaaccatcgacatggatccaacccgcccgaaggccatttggggctttaacggcactgaacgccccggcgctgtttacctggcagcggctctggcagctcacagccagaaaggcatcccagcattctccatttacggtcatgacgttcaggatgccgatgacacatcgattcctgccgatgttgaagaaaaactgctgcgctttgcccgcgccggtttggccgtcgccagcatgaaaggtaaaagctatctgtcgctgggcggcgtttcgatgggtatcgccggttccattgttgatcacaacttctttgaatcctggctgggaatgaaagtccaggcggtggatatgaccgaactgcgtcgccgtatcgatcagaagatttacgacgaagccgaattggaaatggcactggcctgggctgataaaaacttccgctatggcgaagatgaaaataacaaacagtatcaacgtaatgccgagcaaagccgcgcagttctgcgcgaaagtttactgatggcgatgtgtatccgcgacatgatgcaaggcaacagcaaactggccgatattggtcgcgtggaagaatcacttggctacaacgccatcgctgcgggcttccaggggcaacgtcactggaccgatcaatatcccaatggtgacaccgccgaagcgatcctcaacagttcatttgactggaatggcgtgcgcgaaccctttgtcgtggcgaccgaaaacgacagtcttaacggcgtggcaatgctaatgggtcaccagctcaccggcaccgctcaggtatttgccgatgtgcgtacctactggtcaccagaagcaattgagcgtgtaacggggcataaactggatggactggcagaacacggcatcatccatttgatcaactccggttctgctgcgctggacggttcctgtaaacaacgcgacagcgaaggtaacccgacgatgaagccacactgggaaatctctcagcaagaggctgacgcttgcctcgccgctaccgaatggtgcccggcgatccacgaatacttccgtggcggcggttactcttcccgcttccttaccgaaggcggcgtcccgttcaccatgactcgtgtcaacatcatcaaaggcctgggaccggtactgcaaatcgcggaaggctggagcgtggaattgccgaaggatgtgcatgacatcctcaacaaacgcaccaactcaacctggccaaccacctggtttgcaccgcgcctcaccggtaaagggccgtttacggatgtgtactcggtaatggcgaactggggcgctaaccatggggttctgaccatcggccacgttggcgcagactttatcactctcgcctccatgctgcgtatcccggtatgtatgcacaacgttgaagagaccaaagtgtatcgtccttctgcctgggctgcgcacggcatggatattgaaggccaggattaccgcgcttgccagaactacggtccgttgtacaagcgttaatacattactccctgatgtgatgcccggtcgctccggctaccgggcctgaacaagcaagagtggttagccggataagcaatgttatccggctatattgcaggagcgattatgaaacaagaagttatcctggtactcgactgtggcgcgaccaatgtcagggccatcgcggttaatcggcagggcaaaattgttgcccgcgcctcaacgcctaatgccagcgatatcgcgatggaaaacaacacctggcaccagtggtctttagacgccattttgcaacgctttgctgattgctgtcggcaaatcaatagtgaactgactgaatgccacatccgcggtatcgccgtcaccacctttggtgtggatggcgctctggtagataagcaaggcaatctgctctatccgattattagctggaaatgtccgcgaacagcagcggttatggacaatattgaacggttaatctccgcacagcggttgcaggctatttctggcgtcggagcctttagtttcaatacgttatataagttggtgtggttgaaagaaaatcatccacaactgctggaacgcgcgcacgcctggctctttatttcgtcgctgattaaccaccgtttaaccggcgaattcactactgatatcacgatggccggaaccagccagatgctggatatccagcaacgcgatttcagtccgcaaattttacaagccaccggtattccacgccgactcttccctcgtctggtggaagcgggtgaacagattggtacgctacagaacagcgccgcagcaatgctcggcttacccgttggcataccggtgatttccgcaggtcacgatacccagttcgccctttttggcgctggtgctgaacaaaatgaacccgtgctctcttccggtacatgggaaattttaatggttcgcagcgcccaggttgatacttcgctgttaagtcagtacgccggttccacctgcgaactggatagccaggcagggttgtataacccaggtatgcaatggctggcatccggcgtgctggaatgggtgagaaaactgttctggacggctgaaacaccctggcaaatgttgattgaagaagctcgtctgatcgcgcctggcgcggatggcgtaaaaatgcagtgtgatttattgtcgtgtcagaacgctggctggcaaggagtgacgcttaataccacgcgggggcatttctatcgcgcggcgctggaagggttaactgcgcaattacagcgcaatctacagatgctggaaaaaatcgggcactttaaggcctctgaattattgttagtcggtggaggaagtcgcaacacattgtggaatcagattaaagccaatatgcttgatattccggtaaaagttctcgacgacgccgaaacgaccgtcgcaggagctgcgctgttcggttggtatggcgtaggggaatttaacagcccggaagaagcccgcgcacagattcattatcagtaccgttatttctacccgcaaactgaacctgaatttatagaggaagtgtgaaatgctgaaaacaatttcgccgttaatttctcccgaactattgaaagtgctggcagagatgggacatggagatgaaattattttttccgatgctcactttcccgcccattcgatgggaccgcaggtgatccgcgctgatggcctgttggtgagcgacttgctccaggcgattatcccgttatttgaactggacagttatgcaccgccgctggtgatgatggcggcggtagaaggtgacactctcgatcctgaagtagaacgacgttaccgtaatgcgctttcactacaagccccgtgtcctgacatcatccgcatcaatcgttttgcgttttatgaacgggcgcaaaaagcctttgcgatcgttatcacaggcgaacgagcgaagtacgggaatattcttttaaaaaaaggggtaacaccgtaatctcataccggtacgcccgcatgacgcgggcggttatcgaatgatggggtgaaaaatatgaaagcggcacgccagcaagcgatagtcgacctgctgctgaaccataccagcctgaccacggaagctctctctgaacagctaaaggtcagtaaagaaaccattcgtcgcgatctcaatgaattacagacgcagggtaaaattctgcgcaatcatggacgcgctaaatatatccaccgtcaaaatcaagacagtggcgatccctttcacatcaggctgaaaagccattatgcgcataaagcagatatcgcgcgcgaggcgctcgcgtggattgaagaagggatggtgatagccttagacgccagttcaacttgctggtatctggcacgccagttgcctgacatcaacattcaggtcttcaccaatagccatccgatttgccatgaactcggtaaacgcgaacgcattcaactgatcagttccggcggcacacttgagcgcaaatatggctgttacgtcaatccctcgctgatttcccaacttaaatcgctggaaatcgatctgtttattttttcttgtgaagggatcgatagcagcggcgcactgtgggactccaatgcgatcaacgctgattacaaatcgatgctattaaaacgtgccgcgcaatcgttgttattgattgataaaagtaaatttaatcgttcaggggaagcccgcatcgggcatctggatgaggtaacgcacattatttctgatgagcgccaggttgcaacttctttggtaacagcctgacggaaagggtagcaggccggagacgacgccccggccttgcctgttatcgctcgtcgcgacgaccacccaccgcagcccagatgcggcggacgtgcaccgtcacttcttcgcgatcgtgatacaactgccgcgcctgaatctgagcatttatgccatgttcatcaagctgtgcctgaatatacgccagattgtgtgacacttcttcgtagcgttttttcatcggcagtttgaggttgaaaatggtttcacggcaccagccattaaccagccactgcgccatcaatgccgcaactttcgccggtttttcaaccatatcgcataccatccaggagatattgctgcgcgtcggacggaatttgaaaccgtcttcccgcagccacgtcacctgtccggtatccatcagactttgcgccatcgggccgttgtcgacggaataaacccacatgttgcgcttcaccagttggtaggtccagccgccagggcaagcgcctaaatccaccgcccacatcccgttcgccaggcgttcatcccactcatccgcaggaataaacacatgaaatgcctcttccagtttgagcgtggaacgactcggcgcatctgccggaaatttcaggcgcggaatgcccatatagaacggcgaattattgttgctgtatgagtaaccggtatagcagcagcctggtgcaataaagaatacatgcacaaccggacgcttcggcgtttcatagttcgccagcaccccggcatcgcgcaaggcagcgcgtagcggaacagtaaatttacggcagaatttcagtaactctttgctttcgttggtatcggcaacttcaacacgcagttcaccgcccttctctactacgccctgtaacatgccgacaatgggggtaatacgatcttctggcggcaaatgctgcaggagttcccccaccacaaaccactggcgggcaaaaattaatgaactgaacggcagctcacggattaacttatcgccatcatcaggttgataacattcataaatgacataacccgcattctctttcacgcgggcaaaaccgaaaatttcccgctggccggctttatcggtaatttctgcggcgcactctttttcaaagcccggacggcacagcaatacaaccttattcatgacttacgcccttgcgctttaaacggatagcaccaactaacattaacgcccagcccgcgaggaagctcacgccgccaaccggagtgacaaacgcccacaaacgcagatgggacagcgccaggcaataaaggctgccgctgaacaacaccgtgcctaacgcgaggaaaacgctactccagtaaaaccagatactgatgcgacgctgcattgccaccgccagacctaagatcgccagcgtatgaaacgcctggtattcgaggccggtctggatccagcccatctcaacggcccccatggttttacttaacacatgcgcgccaaaagcgcccagagccacaaaaatgaagccgctaatggcggcgaaaatcagcataaaacggctggtcatggtcgtaccctacgtaaattattgttcataacgaaagcggaatttttcttgttcagcagcggctttcgccaggatccattggcgaaaggcggctattttacccagttctgcctgactgtcatgacaaaccagataaaaagcatttttactgaccagaacatcattaaacgggcaaacaagacgtccggcctcgatttcagattgcgccatcacgttatttgccagcgccactccctgcccgtggatagccgcttgcagcaccatggcgctatggctaaaaattggcccttgctgaacgttgatatgatttaaccccaactgtcgggtatatgtctgccagtcacggcgcgaagcatcatgtaataacgtatgtttagccagatcttccggtgtcttcaagggtttttcgccagtcagcagtagcggcgaacacaccggcaataaatattcggcgtacagtttttccacccgtagccccggccagttgccccgaccataaaatatcgccacatcaacatcatccgccagcttatcttcctgacgatcaaccgcctggattcgaacgtcaattcccggataagctgaattaaagctggaaagtcgcggaaccaaccaatgaatggcgaaactggggagtaaactgaccgtcaacgcccccttggcgctacgggcctggagtttacgcgtcgcttcggttaattgcgaaaatatctctttgatatcgaggaaatagctttgcccttcctcggtcagcaggagtgaacgattacggcggcggaacagttttagccccaaaaaatcctcaagagacttgatttgatgacttactgcggcttgggtcacaaaaagctcttctgctgcgcgagtgaaacttaaatggcgtgctgcggcatcaaaaactcgtaaggcatttagcggtggtaatcgtttagacatggctattaaactttgatgttaaatgaatttaacaattagatcacactatgtaacctattagtttttttaatctgagccattataaattgtccgttgagcttctaccagcaaatacctatagtggcggcacttcctgagccggaacgaaaagttttatcggaatgcgtgttctggtgaacttttggcttacggttgtgatgttgtgttgttgtgtttgcaattggtctgcgattcagaccatggtagcaaagctaccttttttcacttcctgtacatttaccctgtctgtccatagtgattaatgtagcaccgcctaattgcggtgcttttttttaccttgcgatcgcgaattactgatccagttcgaccatctctttcacgtcagtacggttgatctgctgtttgttgccattagcgtctttatacgaaatcataccggtatcgttatcagtctgtggtttgccgtcagagacgatggtacgtccgtcattggtgtgcatcacatagttcgaaccggaacaggcgctcagggcaaaagtcagcatacaggcagaaataattgcggcagtctttttcatcatcttctccttaaagcgattaataaatcttaatagtattgattaacaggctaaaattaacgcctaacactattcagcatatgttacttaccgcggcttcgcaggatatccagataattctgatggttagcactctccttgtatcaaagtgaattttgcgtcacgatcggtgcatcaagccgaggagtaccatgaacgtttttaatcccgcgcagtttcgcgcccagtttcccgcactacaggatgcgggcgtctatctcgacagcgccgcgaccgcgcttaaacctgaagccgtggttgaagccacccaacagttttacagtctgagcgccggaaacgtccatcgcagccagtttgccgaagcccaacgcctgaccgcgcgttatgaagctgcacgagagaaagtggcgcaattactgaatgcaccggatgataaaactatcgtctggacgcgcggcaccactgaatccatcaacatggtggcacaatgctatgcgcgtccgcgtctgcaaccgggcgatgagattattgtcagcgtggcagaacaccacgccaacctcgtcccctggctgatggtcgcccaacaaactggagccaaagtggtgaaattgccgcttaatgcgcagcgactgccggatgtcgatttgttgccagaactgattactccccgtagtcggattctggcgttgggtcagatgtcgaacgttactggcggttgcccggatctggcgcgagcgattacctttgctcattcagccgggatggtggtgatggttgatggtgctcagggggcagtgcatttccccgcggatgttcagcaactggatattgatttctatgctttttcaggtcacaaactgtatggcccgacaggtatcggcgtgctgtatggtaaatcagaactgctggaggcgatgtcgccctggctgggcggcggcaaaatggttcacgaagtgagttttgacggcttcacgactcaatctgcgccgtggaaactggaagctggaacgccaaatgtcgctggtgtcataggattaagcgcggcgctggaatggctggcagattacgatatcaaccaggccgaaagctggagccgtagcttagcaacgctggcggaagatgcgctggcgaaacgtcccggctttcgttcattccgctgccaggattccagcctgctggcctttgattttgctggcgttcatcatagcgatatggtgacgctgctggcggagtacggtattgccctgcgggccgggcagcattgcgctcagccgctactggcagaattaggcgtaaccggcacactgcgcgcctcttttgcgccatataatacaaagagtgatgtggatgcgctggtgaatgccgttgaccgcgcgctggaattattggtggattaatgacaaacccgcaattcgccggacatccgttcggcacaaccgtaaccgcagaaacgttacgcaataccttcgcaccgttgacgcaatgggaagataaatatcgccagttgatcatgctggggaaacagcttccggcattgccagacgagttaaaagcgcaggctaaagagattgccggatgcgaaaaccgcgtctggctgggatatacagtggctgaaaacggcaaaatgcatttctttggcgacagcgaagggcgcattgtgcgcggcctgctggcggtgttgttgactgccgttgaggggaaaaccgccgccgagttgcaggcacagtcaccactggcattgtttgatgagctgggattacgtgcgcagcttagcgcctcacgcagccaggggttaaatgcgttaagcgaggcgattatcgctgcgacgaagcaggtttaagcacagaaccgggtcggataagacgttcgcgtctcatccgacctgattgtttaaccctgacgcgccgctttcgccatcatcttcttcagcgcatgagaaaccgcaacaaacccaaaggtggcggtcaccatcgttgccgcgccaaatccagatgcacaatccatccgcttcggcccttctgccgtggctttcatcgcacacaccgtaccgtctgactgcgggtacaccagcgcttcagtagaaaacacgcaatccacgccgagcttacctttactgtttttcactacgccaaaatcgcttttcaggcgctcgcgcaacttcgccgccagcgggtcctgaatcgttttcgccagatcggtaacctgaatctgcgtcggatcaatctgcccacccgcgccaccggttgtgaccagtgggattttattgcgccgacaataagcaatcagcgccgctttgggccgtacactatcaatggcatcaatcacgtacgaataacccacgctcatatactgcgctacgttatccggcgtcacgaaatcatccaccaccgttacacggcactccgggttaatctggcgaatacgctccgccataacttccgcttttgccagcccaacgttatcgcgcagggcatgaatttgccgattggtattggtgacgcacacatcatccatatcgataagcgtgattgcgccaatccccgtgcgcgccagcgcttccgccgcccaggaaccgacaccaccgataccaaccacacaaatatgcgcgtcagcaaacagttgcaacgctttttcaccatacagacgcgctgtgccaccaaaacgctgacgccatgcatcactaattaccacagacatagcacctcagaattaaaaagggcgaggttatccctcaccctaaacgcataaatgcctgatgcgctacgcttatcaggcctacataactcctgcaatattttggatttgcatgatttgtaggccggataaggcgttcacgccgcatccggcatgaacaacgcgcacttagtcaataatcaggatgtgaggttacccctcaccctgtcatatccgtaaaaacggcatacagaatatcacatcagccgctaaagacgttacctgcgcccggggcggttttcagcacccagacacgtccatagtggttgtaccaacctgcgcggtgtccggcttccggcccgatcccttgatagatatcgaagtgttggcctttgattgcaccaccgacatccagcgccaccatcagacgcagttcgtactgaccattaaatttgccgttattatccagcaacggcacttctgccagcaaggtagtacctggcggaataatggaacgatcagaggcaactgacgcgcgaccaaccagcggcaccgcacttgcccctttcaccggagcaaaagattgcggtttaaagaagacgaaagacgggttctgttccagcagctcgcgaacctcggcttcactgtgtgtttcgccccagtgacgaatcgcctgcatcgacatatcttcttttttcacttcgccacggtcgatcagcaccttaccaatgctgcgataggcatgaccgtttttccctgcatagctgaaaaagttaagcggactgccatcaccaaagtcgatatacccactaccctgcacatccataatgaagttatccatcagggagttactgtaagcgagaatatatttatcactcaatgcccccgcgtagatctccgcacgagacggcagacgaccacgttttggcggcatacggtaaataggatactggaactcgccctggcgggtatggcgcgcctgaattaccggcgtgtaataaccggtaaactgcacgttaccatagttgtcggcaccttccatctgccaggcatcaatgccgaactggcgcatattgcgggtatcaccgcctgcgcgcagccactcttgcaccgcgttataaacattactctggttgccatacagacgcggtgacgaattacggatatggttaatttgctcggcaaaatcaccggcgttaatcggcgcgccaacggcatctggctggttcaccagagagaaaggctgggtaaatttcccgtctttatattgctgtccgcgatcggttggtttggaagagcaggcggcaagcattgccacaaccgtgcccataagaaggtactttacccaacgtcctttcattgttctcttcttcaggttaaaaaataaggcgcaacgaagataacaaaccgccgcgtttaatgaaatgagcagcctctccctgacgcaaattttgcacaaaaaataggctttagtgatttgtttttgttcaaaatcatgccaaatccgtgatcggggtaaaaaaaaggttgcatgaaaacgcgagcggagtatagtgcgcatccacggacgcggggtggagcagcctggtagctcgtcgggctcataacccgaaggtcgtcggttcaaatccggcccccgcaaccaattaaaatttgatgaagtaaagcagtacggtgacgcggggtggagcagcctggtagctcgtcgggctcataacccgaaggtcgtcggttcaaatccggcccccgcaaccaatcaaatttgatgaagtaaaagcagtacggtgacgcggggtggagcagcctggtagctcgtcgggctcataacccgaaggtcgtcggttcaaatccggcccccgcaaccaattattgaacaccctaacgggtgtttttttgtttctggtctcccataaaaaagcgccattcagcgcctttttatcatccccttctcgccagcgtcgccccatcggcaaaatacgctttaatccccgcaagaatagactccgcaacttcctgctggaaagtcgccgttttcagtttacgctcttcctcaacgttactgataaacgccgtttcgaccagaatggagggaatatctggtgcctttagtacggcaaacccggcctgttcaacttgatttttatgcagcttgttgattttaccgagcttattcagtaccgctttaccaaacttcaggctgtcggcaatggtcagcgactgtaccatatcgaacatggtgtggtcgacatagcggtcaccgcttttgctcacgccaccaatcaagtccgaggcgttctgggtttgtgccagatattttgccgcagtactggttgcacctttggttgagagcgcaaacacagaggaaccgctcggctgacgactggtaaaggcgtcggcatggatagagacaaacaggtcagcacgctgtttctgggcttttgctacgcgcacttgcaatggaatgaagatgtcttcattgcgcgtcatgtacaccttcatattgccctctttctcgatcagagagcgcaaacggcgagctatttgcaataccacatctttttcgcgcgttttgtatttccccaccgcaccggagtcttcgccaccgtggccagggtcaagcataatgacaatcggacgatcgcgccctgctttacccggttgtggaccactttgcgctggcggcacctgcttttcgaggtcgcctttgttgtaatcctccagcagcgccagcagcgggtcctgcatatcctgtgcattggccggatagaggtccatcaccagacgctctttaaacccggcgaccggcgcaagggcaaacagctgcggttttacgttttgctttaattcaaaaaccatccgtacggtttgcgggtcaaattgcccgacgcgcgccgacttgatgaacgggtcgtctgcacgaatttgtgccgccatccccttgagtaccgagttcaggtttacatcttcgatatccaccaccacgcgttcagggttactcaacgcgaactgcttatatttcagctgacgatttgattccaccgtcacgcgggtgtagctggacgcaggccagacgcgcaccgccacgacctggctgaccgcagccagactgacctgacttacgctcaatagccacatggcacccgcgccttgcagtaaacgacgacggctgattgcagtgttggatcctgacatgcctctcccgagcaaaagaaatctaagctgtgtaacaagtaaacgactaatttgaccggaaactttagcgaaagacgcataatctgtcatctaataaacggtaaacattctttttatattcacggcattactgataaaaaagtcgctctcgcataaaatttacacttgcaccctgcgaaaaaacagaataaaaatacactaatttcgaataatcatgcaaagaggtgtgccgtggtaaaggaacgtaaaaccgagttggtcgagggattccgccattcggttccctatatcaatacccaccggggaaaaacgtttgtcatcatgctcggcggtgaagccattgagcatgagaatttctccagtatcgttaatgatatcgggttgttgcacagcctcggcatccgtctggtggtggtctatggcgcacgtccgcagatcgacgcaaatctggctgcgcatcaccacgaaccgctgtatcacaagaatatacgtgtgaccgacgccaaaacactggaactggtgaagcaggctgcgggaacattgcaactggatattactgctcgcctgtcgatgagtctcaataacacgccgctgcagggcgcgcatatcaacgtcgtcagtggcaattttattattgcccagccgctgggcgtcgatgacggcgtggattactgccatagcgggcgtatccggcggattgatgaagacgcgatccatcgtcaactggacagcggtgcaatagtgctaatggggccggtcgctgtttcagtcactggcgagagctttaacctgacctcggaagagattgccactcaactggccatcaaactgaaagctgaaaagatgattggtttttgctcttcccagggcgtcactaatgacgacggtgatattgtctccgaacttttccctaacgaagcgcaagcgcgggtagaagcccaggaagagaaaggcgattacaactccggtacggtgcgctttttgcgtggcgcagtgaaagcctgccgcagcggcgtgcgtcgctgtcatttaatcagttatcaggaagatggcgcgctgttgcaagagttgttctcacgcgacggtatcggtacgcagattgtgatggaaagcgccgagcagattcgtcgcgcaacaatcaacgatattggcggtattctggagttgattcgcccactggagcagcaaggtattctggtacgccgttctcgcgagcagctggagatggaaatcgacaaattcaccattattcagcgcgataacacgactattgcctgcgccgcgctctatccgttcccggaagagaagattggggaaatggcctgtgtggcagttcacccggattaccgcagttcatcaaggggtgaagttctgctggaacgcattgccgctcaggcgaagcagagcggcttaagcaaattgtttgtgctgaccacgcgcagtattcactggttccaggaacgtggatttaccccagtggatattgatttactgcccgagagcaaaaagcagttgtacaactaccagcgtaaatccaaagtgttgatggcggatttagggtaagcgatgaaaatcgtcggatgcgacatgcgtaacactcgtacgtcgcatccggcaattacgtttattcccgtgaactaaacaacgccgccagaccactgcgccgctcagtacgagtggcgattgccgcacttaatatgcgctcatcggcatacagcgacagacggcgacgcgcgcgggtcaccgcggtataaaccagctctcgcgttactaccggcgtgcgttggctcggcaaaatcaacgccgcatggtcgaactccgatccctgcgatttatgtaccgtcatcgcccacgtagtttcgtgctctggcaagcgactcggttgcacagacttaatattgccgtccggcatcgcaaaccagacgcgcgtcccctgcccgcgatccagcgcaataccgatatcgccattaaacaacccaagcgcgctgtcattacgggcaatcatcaccggtcgaccttcgtaccaacgagagtgcggatgacgatgaattttgcgcttctgttgcataaactgctcaattcgctcattcagtccagccacgccaaacggcccttcccgcagggcgcacaaaagctggtactcattgaacgcctgaatgattaaatccggctcggcacgcgcttgcagcagatccagataacgtccgtaacccgcaagagcttcctcaagcatcgcaatataatcttcgccgctctgtaaaagccgtttttcgatatcagtaaaatcctgctgaaaaacggttttcactgccgttttatcaccacggttgatcgccgcagctaactgaccaatgccagaatcgctgccgaaacgatagcttttttgcagcaggcagagactgtcgcgcaaagatgccgcttctgtgccggttcctgccggaacgtgagtccccgtcaggcggcttagctgcctggcacgctcggcggtaaagcccgcgttggcataagcgcagatatcgcccagcacagccccagcctcaaccgaggccagttgatcacgatcgccgagaaagatcactcgcgcatgatcgggcaaggcgtcgatcagtctcgacatcataggcagatcgatcattgacgcttcatctaccaccagcacatcaagatgcagcgggttaccggcatgatgacgtaaacgctggctacccggctgcgcgcccagcaatcggtgcaaagtgctggcatcttccggaatgcgtttcttttgttcatcggtcagcggtaactgtcgcaaagccttgccgagagattcggttaagcgcgcggcagctttacccgttggtgcagccagacggatacggcagcgttcgccgtcggccatttgaattaacgctgccagcaacttcgctacggtggtcgttttaccggtgccagggccgccggaaatcaccgagatccgccgcgtcagcgccactgccgccgcaactttttgccagttaatttcatcgcttactggaaaaagtttgtccagggtttgcgccagtagagcttcatcaacctcaatggcatgattcacttcgttgaaaaagcgtgccactgtgcgctcgttacaccacatgcgattcaaataaagacgatcgccacagaggatcatcggcgtgggttcatctcccctgctgaccgcttgagaagccagcaagcattcttcccaattttgtagctcaccgatttcactgacacaggtcgccaacagcggatgcgacgcctcgttattttccagtcgtgaaagcggcaaacaaacgtgtccctctccggcatcatgacttaacagtgccgccgcgagggtgacggcaggatgttcatctcccgccacggtcagggcaaattgcacatccagcgggcgtagctgtttgtgctccacagcttccagtaattgcttttgcaatttcattacgcctcctccagggtcataccggcaaacatctcatccatcagggcaatcaacccggcgttgggtcgggttgtgtaaatcccctgttgcggatgttctttatcaacgccacgcaggaacagataaataacgccgccaaagtggtgctcatagtcgtaatcagcaatgcgatggcgcagataacgatgcagcgccagggtataaagctgatattgcagatcatagcggtgtgcctgcattgccgctgccatagcctgttgggtgtaagccgaactgtcttcacccaaccagttggatttatagtcgagcaggtaataacgcccttcgtggcggaacaccaggtcgataaagccttttaacatgccacgtacctgcatgaactccagcggcgggcagcctgcggatagcgggtcaaactggcggattaacgtatcaagctgactggcgataagcggttcactaatcggcagataaaactccatctccacctgtttattgcgggcggaaagttgactcaggcttacgccggtttcattgagaggtgcctggaggacagccgtgatccactcggtcaataccggttcccactgcgattcaaagccgccgagttccagtttttcccgcacccagttcgggtcaaccggctgggtaaaatccaggtcttcaaacaaactgtgcaagaacgtccccggtgacgcaccgcgcggaaactgatgtggtgttaacgtcggttcttcaacgacgctggcaacgcctgcagcatcgacatccagccgaggcatcaaatcctgggcgataccgtgaccacgctgttgcaaaccagagtagctggtgacgcgccagttatcgccgggcaatcgttgtaacgtcttcgcattcagctctgctgtagaaacatcattaacctgccagggttggttatcaccagtttgtgccgtttgccaggcaatatcatcatcgcataacgcttcaatacaggtgcgaagccctgccgcatcttgcggttcccctttttgcagcaaacgcccgagcgcactttggtggacgtcggtgtcaccttttttatcgccacgacggcgcaccagcggtgcaacgccgagactgcaatgccaaaccgaacgtgtcagcgccacgtaaagcaaacgcagatcttccgccagacgttcggcctccgcgaggtcgacgctttctggcgcagcattaagatccagaactgcctcaaacgagtggcgatcgtgataaaacgcctgctcctggacgcggaaattggtgataaacggcagccagaccaatggatattccagccctttcgatttgtggatcgtgacaatctgcaccagatgtttatcactttcgagacgcatttgttggctggaggcattactgtctggctcgaggatatgttgcgataaccagcgtaccagcgcatgttcactttccagctgcgttccggcttcttgtagcagttcgctgatatgcaagatatcggtaagacgccgctcaccgcctgccgttgccagcaagttttcagcaatgttacgcgccgacatcagcgcccgcagcatcggcataacgccacgtttgcgccagatttgccgataaccatcgaactcttcgactaccacatcccacgcatgttcgtcattgttcagcgtttcgatatccagcgcgttcagccccatcattgacgttgccagcgcactacgcagggtgttctcacgttcgggcgtcatcaccgcctgcaacaaccaaagcatttcctgcgcttccagagtttcaaaaacactgtcgcggttcgaaaggtaaacggaagggatttccagcaacgttaaggcatcgcgcacctgggcggcctcctggcggctgcgcaccagcacactgatgtccgaagcacgcaccggacgcgcgtcgtcgccgttcatcagcaacgcttcgccccgctgtccggcttgtagccagtcgcggatttgcgcagcacatacctgcgccatggtactttgataatcgccaacgccgcagctttcgccttccatcagccacattttcatcgcaggctgtgtttcacctttaaatacaaaacgtaacgcctgatttttcccggctgatttcactggaataaacggtatttcgcgaaacatgaacgcgtcatcagtctggctgaaaagcttattcacgctgttcaccattcctggtgcggaacgccagttggtgtctaaagtgtagtgggcgtgaacttcgctacgcgccttcatataagtgaagatatccgcaccccggaatgcatatatggcctgcttcgggtcgccaattagcaacaatgcggtttccggctgatggtgccagatacggcgaaaaattcggtactgctgggggtcggtatcctgaaattcatcgatcattgccaccgggaatcgcgtacggatcgccgctgccaacacctcaccgctttcgctacgcagcgcggaatcgagccgacttaacatgtcatcaaaacccaattcgccacggcggcgtttttcacgcgctactgtttcgcggatctcagccaatgcgcgggtgatcaccagatcgcggatcgacaatggttctgcaagcagttgatcgatcgcctcaaacagtggatgtcgcggggtttcccccccggccttcgtgcgatcttctaagaaacgctgggagaatttttccagcgactccggcaactgataactgtttgtctcttcttctgcccaggcgctgatcttgtcgatccatttagcctgattgctacggttaaacttgcgtcgatcaataccagaagattcgatcagcgcatccagttcacccactgcgtcgcgccactgctgttttaccgtatcaatacgcgccacaatttgcgcgtgacgggaagccagcgtttcatcatcgggcggcggtgctttgataaccggcgcttcgccttgcagataacgattaatatcgcgcagcaacgcctgcggccctttccaggtttcaaagacgacctgggctatttcacgcggcagcgggtagcagtggcgacgccagaaatcggcgcaggcctggtagcgtagcagagactcatcttcaatcagctgctgctcaaacagcatgccggattcaaaggcattcaggttgagcatgcgctggcaaaagccgtgaatagtaaagactgccgcttcatccatctgccgttcggctaacaacaaccactgcgcggcttgcgctttatcgtcgatctcttccagcaggcgttcgtacagtggattgtcggtggtttcacgcagacaggcgatgcgcaactcgtggatattgctacggatacgaccgcgcaattctgccgtggcagcctcggtaaaggtgaccaccagcagttcttcaacggtcagcgggcggggaaaggcggcggaaccgcctagtccaagtaacaggcgcaaatagagcgccgcaatcgtaaaggttttgcctgtgccggcagaggcttcaatcaggcgctcaccctgtaagggcaagcgcaaaggatctagtgtctcggcgacatcactcattcttttcactcatcaggggcattgtttgctgcaacgcgctgacgttctcccacactttccagccttcagggtgtacatattcggctttcccgttctggctgccggaaatctgcgacagaatagccatgccttgcggctcgaccaccgcctgatggaagaaatcagcaagtttttgcggcgtcagcagttttatctgggccacgattttatcacgcgaatcgaagcgcatattgccgcgatcgaaatctttacttaacttcgatgcttcttcgccgagcgtttgcggtgcctgcagcatctgggtaattaccgcctgctggatttgcgcaaactcatctggcttcatcgctcgcaattttgcctctgcggttgggaaaaacgccttgtaacgctcccacaagaatgaaggctgtttatcattgctttgcaaaaggaagcccatgccccactgacgccccacgctcattggaaacgcaaacacggcatagcccaattgttcttcggtacgcaactgattgtagaaccacggctgtacgatctgccccaacagagagctataggctgagctggtgtattcatcgtagccagtcggtacaaataccgctgccagtgcggagtcggtgctgttaccggctttttcaaagatgacggattgttttttatcgaccactacatctttgtttcgacaccactctgaaccatcagcgcccaactgtttttgcacatcgcgtgccagcgttgttgcctgggcctcggtcatgttgccgataaccataaactctggtcgagcccctgattttaaggcgtcgcgataggccagcacctctttcaacgtaatggagggcaaaattttacgccgttcatctcgcgagaagtacggcacttgcgagagcatctgcgcgggcataatcgcctgctcaaacgctttacccttttctgcggaatccatcatctggttataccaggacttcgcctgctcaagctgatcttccgtagcggtatagctaaagtacccctcgagcaatgcctggaacagctgcggcagacgctgggtgtaaccattagcattaaccataaggccgttgttagcgttggtggaaaaacttatgccaccaaccgacgcctggttgcttaactgatcaagcgccagccctgcgagataatcattgagcgcaaacatcacctgattgcgggcgctgtccatggctttcggattacgcaaaatcaggctgacatcagctttgggctcgctggcaaaataacggcttggcgcatacaccacgcgcagattcgactcatcaacaatcagctctggatggtcgtatttcttctctgacttaatcagcgagaaatcatcaggaatataagggttaagctctggcaaagagagcgcaatgtcggcggcttttttctgccagtcggcgaaagtttgtgcgctgattttatcgacctgatacggcgcatcgacaaagtaagccgttttgttgtgcggctctttcgggctgatataccagatacgcgcattctgcggcgtcatcatcgccagacgttcctttactgctttagcatcgtaccgatcggcaatattgactgcatccagcgtatgctcaacaggaacgcgaatcatggtatctgccagccattcgacgtaatccatatcacgggtgatcgacggataacggaagtcgatatccagcacattcgccagttcatcgaagtattgtttatcaatgcctttttcacgtaacagattgagatagctaaaaattgccgccacaacctgatcgcgattagccaggcctttatcggttaaagacgcagagatcgctaatacgccgctgttgccgttgacgataggatcggagttggcgctaatgccctcaactaatccctgcttttgcagccagtcagaaagtgtacctgggctgcgattgccaatcagataggtaatcaattcatcggttttactacggaacttcgctgagttgttatcgatgcgaaactcaacgcgcaacactttacgcggcagcgcagggacgtaatgaatgataatgcccttttgcgcgtcggtgactaccggcacggtgatttccggttttttgctctctttgttcggcacgcgaccaaaggtgtccgccgccatttttgccaactccggcagcggtttattactgtaaataaccgccttcatcaaattggcggaatagtacttctcgtggaaatctttcagcgcctgctgcaccggattaccaggtttgtcgcttaaagtttcgaggttaccaccagaaaactttgaaccggggtgtgccgggttaatggtttctgcgctgacctgtgccatgcgcatcccgtcacgcgtacgcgccatggttaattcagcgttcaccgcattacgctcacgttcggcatatttcttgtcgagcaaaggttcagcaatagcatcggccaggcggtctaccgcaccaggcaaggcgtcgttctcaacttccagatagaaagccgtgcgatacggcgcagtgctggcattgtgactaccgccgtgcattttgagatattcggccagactgtcagcctgcgggtactttttcgaccccatcagactcatatgttcaaggtaatgtgccagcccctggtacgcctcgggatcttccagcgacccaacgggcaccaccagcgccgagagcgatttaactgcctgcggatcagaaaccagcaagaccaccataccgttatccagacgtatagcctgatactggcggttatctttatcacttttacggatggtttcctgaatcggctgccatcccgtttctgcctgacttaagggtgcccaaagggcaactaacaacaataatgctttgaaccaggtgctgcggggcattcacggacctcataatcaacttaattttctgtccagattcaacacgttaacgcaaatcatctgccagaatttaatcttgtgctgcacgagtcagcctatgtttatataaccatcagtccgtgactggtgcgcatcataaagtaagcggatagattgcgcaatttttatacagcactcatgactgattaaagcgaaacagcggtaacaggaaacgttgcgactgttcaacgatggcctccattgtctctggtgttaattgccgccagagcctttgataccagatatcatcaccttcgccacgcaccatcatgttgccttcgtaagcctgaaggaatttcgtacgggctttttgcaacgtggaatcgtcatccagcatggcatcgttttgcgcgtcataacaggtttttagccacgcgccgccactttcaggtaacaccagcaatggcgcggacattccttcacgatacccctcaatcagttgtgagaggtaatgcaaagcctgttcggctgcaagcggcggaaaacgccactcgccgtctttgcgtagaaaaaggcgactttcaccattaccaccgctggcacagtagacaaggtgttccagccaaagttgcattccctgggccacacttaataaagagggacgccagcgcaacaggccatccggctgcacctgcggcaaccagccagttatctgcacaccgttgcaggcgagatcaatttccatactctgccccggctggcgacaggcaatgactctgtcggcaagctgctgcatctcctggcactgtgtttcccagaaaatttcaccaaaagcgccatacggtaaatcccctgccgctcggaagcggcggaacaagcgttcggcatcatcctgctcaaccagtgcattcaataactgctgattgatttgataacggctaagtccttccagaataaatggctcggtgtcggggatttcgctgtcttcagtacggaagttcacctgcaaacgcatctggaaaaatgcccgcaccggatgtgcccagaatcgttgtagcgtttccagcggcacggtttccggtaaggtaaacggcagcggctgaacaaattcagaatgtgctttaccagcctggctggccgcaggtagccattcacgagcatagctttgtcgttcgcctggctggtagttttgtggatcaaacggcatccgggtatggaggcaagtaagatgcgcttttacccttgcctcgctttcatcacagttgagcgcttcatcgcccggtagataatgactttgcccgatgtagtcgatcagttcctgcaccagtaccgacgggaaacgctcactgttatcctgaatggaacgaccgatatagctgatatagagtttttgctgcgcggaaattaacgcttccaggaacagatagcggtcgtcatcgcgacggctacggtcgccacgcttcggtttctggctcatcaggtcaaagcccaatggcgcaagctgacgtggataaacgccgtcgttcattcccagcaggcaaaccactttgaacggaattgaacgcattggcatcagagtacaaatgttaaccggtccggcgagaaaacgctggctgatacgttcttgatccagacgctgtgccagttcatcacgcaatagtgacagcggcaccgcgtcgccatactgcgcacctaaaccttcggcgataatcgcctgccattgttgttcgatcagcgtcatcgccgcttcggtttccgcatccggcaggaagaaggcgttgagcatatcgcgacaaaccggcaaccactcttccagcggacgctcctgtgccagcccgcgacgccagatgtttagctgcattagcagtgaagccagatgccccaccagttctgcaattaagccgctcgattcatcataaggtagaaccgattgccactcgccctgcgcgctctccatcgcgtagcccaacaacatacgcgtcaggccaaatcgccaggtgtgttgtccggtggcggggagttccagctcgcgaacgttgtcgtcatctatgccccaacgaatgccggattcgttgacccactggcgtaaataacgcagcccttcttcggtgatgtcaaaccgcgccgccagcaccggcacatccagcaacgccagcacatcctctgacacaaaacgactgtcaggcagtgataacaggctgataaacgcttccagtaccggatgtgactgccgcgcacgacggtcggaaatggcgtaaggtaggtaacgatccgcaggtgcgctaccaaacacagcctgaataaacggactgtagctgtcgatatcagccaccatcacgatgatgtcgcgcggagtaagtgtcgggtcttcctccagcatcgccagcaggcgatcgtgtaaaacttcaacttcacgctgcgggctatggcaaacgtggaaggtgatactgctatccagtggatcaagcgggcgtttgttatcgctacgggaaaactcttcgatgttcacaccagcaacggcgcggttttccagttccagaatgtcagactgaatgttatgcagcaggttatctggcgtgacatcgacaaaggcgtccagctcctggctgctctccaggtcagaaaggagataaatgtagtcgcgcccaagcttaccccatgaagccagcagcgggttgccgacatcctgttcaccatcgctgttaaagagctgcccggcattttcgctatcacgaaatagcggcaattcgcgatcttcaaaactgtgtcgacgctgacgggtcagcagtttcgccagataagcaggatctttaatatcgccccagtaataacggcaggggttggtaaacaggagatggatttcaatatgtttacccagcgcctgtagcgcctggagataaacaggcggtaacgcggaaataccgcatataaagacgcgcgaaggtaaccccggcgggcaggtcgtcgcggactccagcgtttcgataaagcgctgatagagattggcgcggtgccagcgcggttgcccgagttgatgggtatattccaccagcgccttccacaacggggcttgccaggcctgtgcttctcccagcccttcaaccaaatgtcctgtttcccactgtgccagccagtccggacgatagaccagatactggtcaaacaggtccgccgcttttgaggaaagctggaacagttttcgcttgtcgctatcgtcagtcagataatgccgcaacagggtaaagtcttcgcgctccagcaattgcggcagcagagtcatcagtttccagctcatgctctgtttgttaaaggcgctctctttggggatttccggtaacacccggacgaacatatcccagataaagctcgctggcagcggaaaatcaatgtttgccgcaataccaaacttttgcgacagggtcatttgcagccactgtgccataccggtactttgcaccagaatcatctctggttcgaaaggatcgtccagccgttcgcgttcgacaataaactccatcaacgcttccagcacgtccagacgattggaatggtagacccttaacatagcggctcctgactactgacgattcgggcaatgcaggcgggtcatctcgccttctctgcccccgggtgaaactagcgtaacgctgatgctgacacatcccgcctgcgatgtctgcattcggttgacctgccagttggcaggtggcgaaatcgcgcgcagttgcgtttgctgccagccatgccgccagagctgttggtactggtttctgctggcaagactgttcattaatgttcgctggaaacccgataacgcagtgacaatcatcaccatcaacaccatcgccaacattacctccggcaggctaaagccttgttgattcttcagggaagctgacataacgccctctctttcagcggacaaaaatcgctccagccgcgtggcgaaaaaacaatgtttccatcaatgacttcgcctgttcgccacaacgaaacgccttcataaccggcaatcaataaggcttcattatctgccagtaaacgcaaacaaacctgggcatcggtttcagcgtactgcgagcactgaactgctggctgcgtctgccagcagtgcatttttccccacgccagcgccgactgaacgatggcctggcggcgcaatgactgactttccatgctcacgcgagaggcaaaactgcgatcctgttggctcattccttgtaatagcaaactacccaaaaccagcagcatcaggaccagagccagtgacgaaacacccttttcgcggttcacaggttgaatcctgtcacgctatagctggcattcaccacggtttgcggttcagacttactggcagcacgcatattaaccgtcaacaccggcgagaagccgctgacatcctgacgtacgacctgaaaagtgtcgataatgatggcatccggattagtgactttatcccagcccttaccttcacaggatgtcgcaccgcgtagcgtttccagcacatgctccttcagacgaaatccaatctggtcggactcttttaccggttcgcgatcccagataccgttactgttcgcatcccactgcacaatgacacagtcaccctgtccgacaatttccagcccttcgccggtacagatgccatgacaataacccgccctctggagatgcttcgcgacggtaaatacccgcagccagatttcatcttccagcgccagcttacgggtgctcgttaaactttcacgctgtaacgcaggcagaaagcgtgccgcccccagcaacaatacgctactgatcgccatagcaatcaacacttccagcagagaaaaaccttgctcttttacaggcatccttctgtttctccttgctgacaaagccggagtcttccccacggcgaaaccaccagccaccactcgcccgttgagtttttgaagcgaatatgcccggcccatgcggtattgcgcaggccaaagaaagcaagcgaaggtgtcaggtcgctcatttcgacttcgggccagcgtggcacaaagaccaatggtgaactgccatgacaggtattggccccagcagcggaactcacaaggcaccataacgtcccctccctgataacgctgatactgtggtcgcggttatgccagttggcatcttcacgtaaatagagcaaatagtcccgcgcctggctggcggtttgccatagccgttgcgactgctgccagtattgccagccatagagtccacttgcgcttagcatgaccaaaatcagcatcgcgaccagcgtttcaatcagcgtataaccacgttgtgttttcatgccggcagtatggagcgaggagaaaaaaagacgagggccagtttctatttcttcggcgcatcttccggactatttacgccgttgcaggacgttgcaaaatttcgggaaggcgtctcgaagaatttaacggagggtaaaaaaaccgacgcacactggcgtcggctctggcaggatgtttcgtaattagatagccaccggcgctttaatgcccggatgcggatcgtagccttcaatctcaaagtcttcgaaacggtagtcgaagatggattcgggtttacgtttgataatcaacttcggcagcggacgcggttcgcggcttaattgcagatgagtttgatccatatggttgctgtacagatgcgtgtcgccaccggtccagacaaaatcacccacttccagatcgcactgctgcgccatcatatgcaccaataacgcgtagctggcaatgttgaacggcaggccgaggaagacgtcacaggagcgctgataaagctggcaagagagtttgccgtctgccacatagaactggaagaatgcatggcacggtgccagcgccattttatccagttcgcctacgttccacgctgaaacaataatgcggcgcgaatccgggtcgtttttcagctggttcagtaccgtagtgatctggtcaatatgacgaccatctggcgttggccaggcgcgccactgtttaccatacactggcccgaggtcgccgttttcatcggcccattcgtcccagatggtgacattgttttcgtgtagataagcaatgttagtgtcgccctgcagaaaccacagcagttcatggatgatggaacgcaggtggcaacgtttagttgtcaccagcgggaatccatcttgcaggttaaaacgcatctgatgaccaaaaatggaaagcgttccggttccggtacggtcgtttttctgtgtgccttcgtcgagcactttttgcatcagttctaaatactgtttcatggttcctcaggaaacgtgttgctgtgggctgcgacgatatgcccagaccatcatgatcacacccgcgacaatcatcgggatggaaagaatttgccccatgctgatgtactgcacccaggcaccggtaaactgcgcgtcgggctggcggaaaaactcaacaatgatgcgaaacgcgccgtaaccaatcaggaacaaacctgagacagctcccattgggcgtggtttacgaatatacaggttgaggataataaacagcaccacaccttccagcagcagctcgtaaagctgtgatgggtggcgcggcagcacaccgtaagtgtcgaaaatggattgccactgcgggttggtttgcagcagcaaaatatcttctgtacgggagccagggaacagcatggcaaacgggaagttcgggtcaacgcggccccacaattcaccgttaataaagttgcccagacgcccggcaccaagaccaaacggaatgagtggtgcgataaaatcagagacctggaagaaggaacgtttagtacggcgggcgaagataatcatcaccacgataacgccaatcaggccgccgtggaaagacatgccgccgtcccagacacggaacagatacagcggatcggccataaactgcgggaaattgtagaacagaacataaccaatacgtcccccgaggaagacgccgaggaagcccgcatagagtaagttttcaacttcatttttggtccagccgctgcccggacgattcgcccgtcgtgttgccagccacattgcaaaaatgaaacccaccagatacatcaggccgtaccagtgaagcgccacgggtcctattgagaaaatgaccggatcaaactccggaaaatgcagatagctactggtcatctgtcaccacaagttcttgttatttcgctgaaagagaacagcgattgaaatgcgcgccgcaggtttcaggcgctccaaaggtgcgaataatagcacaaggggacctggctggttgccggataccgttaaaagatatgtatatgatccgcgctataaccctccgcgaatcagcccgcccatgccgcgacgctccataaaggctgcaacctgatggcgaacttcggtcgccagttgcgcttccagactacgctgcgcaagattttctgcttcggcataatcaatgcgccgcagcaggtattttgcccgcgctacagaacgtccgttcatagacagatggcgatacccaagcccaatgaggattgccacgcacatgggatcgcccgccatttcaccgcacaaacggagatcgattccatgtatttccgcttcccgggcgatcatcgccagagctcgtaacattgcaggatgaagactgtcataaatgttcgccacccgggtattgttgcgatcaacggccagaatgtattgagtcagatcgttggtgccaacagagatgaaatcgacccgctttgccagatgcggcagcataaataccattgacggcacttccagcatgatgccgatacgtggtttgggaatttcgtaaccgatcatctcctcgacttcacgtccggcacgttcaatcaggcggcgtgcttcatcaacttcatcgaggcttgtgaccatcggcaacagaatattcaggttgcccgtagcggcattagcacgcagcatcgcccgcacctggatcaagaagatctccggctgatcgagcgtaatgcgaatcccacgccaacccaggcatggattctcttcgctgatcggcatgtaaggcagctgcttatctgctccgacatccagcgtacgcaaggtgacgggtttatcattgaacatttgcagcatcccctgatactgcgccacctgttcttcttccgacgggaaaccactttgcagcatgaatgggatttcagtgcgataaagaccgatgccatcaatacggctgcccagtttttcttcatgttccgggcttaaaccagcattgagcatgacttttatacgctcaccgctttttaactgcgcgggtaaattgacgtcatcttccgccagacggctaagctcaatctcttcactaattagccgctgatattcttgcagcagtaccggctccggatcgaccagcaattcaccgcgatagccatcaacgatcagcgtcctacgatgcagcaccgaaggctgaatatccgcgcccatcacggtagggatccccagcgcacgtaccatgatcgcagcatgggagttggctgcgccatctcgcacgacaacaccgactaagcgatcctggggcagctcagcaagcgttgtcgctgacagttcatctgccaccagaatgaaacgttccggccaggcgttcggcccttgattagcgtcatcaagatgaaacagcaatcgctgacccagcgcacgtaaatcgccagcccgctctttgagatagttatcacttagcgcggcaaactgttcggcaaatttttcaatgaccgtttttaccgcccactctgccaccgagcctttatcaacctcggcaaacaattcgcgacgcagccgggtgtccgaaagcaggtgcgagtaaagatcgaaaatagccgccgtttctttttgtgcaccggcggcaaagcgtttgctgtagcggcgaaactcgtttgccgcttcttccagcgccccggtcagtcgttcgcgttccagagccggatccagcgttgatgcctgatacacctgttccattaaaggtaacgtggcatcctgccagccttcggcaatcgccacaccaggtgctgccggtaatgcgcggattcgcgtctggcgatattgcccaaacaaggcagtcaactgcgactgagaaagaatagctgccatctgggtggcaagcgtcaccaggaaggattcttcactttcgtcatactggcgcaactctcgttgctgtaccaccagtacaccaagcaactggcgacgttgaataattggtacgcctaaaaacgcgcggaaacgttcttcttttacggaggggatgtatttgaagctggggtgcttttgcgcatctgcaaggtttatcggttccgccagcctgccaaccaggccgacgatcccttcatcaaacgcgagcgttacagtgcgaccgcgtggttttttcagcccccgggtcgccatcaggtagtaacaacgtcgatcatgatcggccaggtagaccgaacagacctcggtatccatcgcaagacagatgtcggtaaccagaatatttaacgcctcattcaggcgtggtgcgctggctaccttttcgactatttcgcgcaggcgagtgagcataattggcgtgacttaacctcttttacgtcgataagcagatgcgttttgtggttttggcgtattttcctgcagtgacatcaccacactcgcgaactctttcattaccctacggtagacatcacgtttaaatgacaccacctgtctgaccggataccagtaacttacccatcgccagccgtcaaactctggtgtactgctggtttgcatattgatttctgcatcgccgctcaccagctgcaagagaaaccatttttgtttttggccgatacaaaccggcttcgtgtcccaacgcaccaaacgtttcggtaatttgtagcgcaaccagttacgcgttgaagcaaggattcgaacgtctttgcggcttaatcctacttcttcaaacaattcacggtacatcgcctgctctgcggattctccggggttgattccgccttgcggaaattgccaggagtgctgaccaaatcgccgggcccacattacctgcccctggcgattacaaatcacgatacctacgtttgggcggtagccatcgtcatcaatcaccggactacctcaaaataaagctttatatacgaatgattgtttcatactccaggaagacggtaaaccactctctgcagggcattacacactaataacaattgaataactcacagttatgtgcagagttataaacagaggaaggggtggatagccgtttttattcaccttttctgtggatagagttgtgaagaactacggaattactacgggaaaacccggagcattctgaataagcccgatatagacattttaaaatattcattatcagtcaatgcattacatgtaattttagtaatgaaaaagagtaattcgtgacccaggtcacacctctcatttacgggttggcgaaagatcaaccaatgccgtatttatccacagaatgtgccactaagttaagcactgaaccactaaaaactggagtttcgtcgcacgtcaaggctgtaaatggaaacagtagtggaggtttttcacagttatcccagctttctgtggataacatggtgtaagatcctgtttattttcagtgaccagatttggaaaacccgttgcagtgttgcgcaactcgattaccggcaacctaaaaagcaatataaatcagagaattgaacaacgcatgtggaaaaagttacactgcgaatattcggcacataattgctgtttgttttttaatcaaggtatcatgacatgtcccaacctcgcccactgctctctcctcccgaaactgaagaacagttgttagcgcaagcacagcaactttctggttatacattgggagaactggcggcacttgtcgggctggttacgccagagaatttaaaacgcgataaaggctggattggcgtgttactggagatctggctaggtgccagcgcagggagtaaacctgagcaagattttgctgctctgggcgtggaacttaaaactatccctgtggatagtcttggtcgtccgctggaaacaacattcgtttgtgttgccccgttaacgggcaatagcggggtgacctgggaaaccagccacgtgcgccacaaactcaaacgcgtactgtggataccggttgaaggcgagcgcagcatcccgctggcgcagcgtcgcgttggatcaccgttgctgtggagcccgaatgaagaggaagaccggcagctacgcgaagactgggaagaattaatggatatgattgttctcggtcaggttgagcggattaccgctcgtcacggggagtatttacagatacgaccgaaagcagcgaatgcgaaagcgcttaccgaagccattggtgcccggggcgaacggattctgacgctgccacgcggcttttatttgaagaagaatttcaccagtgcactactggcccgtcattttctgatccagtagccatcgctttgacctgccgctttccgggcatataattaccgcttcatttttttggcagggctttttagatgttatttgcatggataaccgatcctaacgcctggcttgcgctcggtacgctgacgctgctggagatcgttcttgggatcgacaatattattttcctttctctggtggtggcaaagcttcccacagcacaacgtgctcatgcgcgccgtctggggttggcgggagccatggttatgcgtctggcgctgctggcatcaatcgcctgggttacgcgcctgacaaatccgctttttacaatattcagtcaggaaatttctgcccgtgatttgattctgcttctgggtggcttgttccttatctggaaagccagcaaggaaatccacgaatccattgaaggtgaagaagaagggctgaaaacacgcgtttcatcattcctcggcgctatcgtgcagattatgctgctggatattatctttagcctcgactcggtgattacggctgtgggtctgtcagatcacctgtttattatgatggcagccgtggtgattgccgtaggcgtgatgatgttcgccgcgcgctcgattggtgattttgtcgaacgccatccttcggtaaaaatgctggcgctctctttcctgattctggtgggctttaccctgattctggaaagtttcgacatccacgtaccgaaaggttacatctacttcgcgatgttcttctctattgcggttgaaagcctcaacttgattcgcaacaaaaagaatccgctctgatactccgtacgctctcctgcgggagggcgtactcactccttttaccctcacagtttaagattttcctgctttcaagatatataacgtcggtttataaacagactattatcataggtaggccaaatgaggataaccggatgaaaaaatgggcagtaataatttctgcagtcggactggcgtttgctgtttccgggtgttccagtgattacgtcatggcgaccaaagatggccgtatgattttgaccgatggaaaacctgaaattgatgatgataccgggctggtgagttatcacgatcagcaaggtaacgcgatgcaaattaaccgtgatgatgtttcgcaaattattgaacgttaacaaataaggtcagcatccggctggccttaagatttttctctttcccttttcccttccctctgccatttttatattccttatgtcgtgattataaaaaggaaacggctatgcaatatcaccgtataccccacagttcgctggaagtcagcacgctggggcttggcacgatgacgtttggtgaacagaacagcgaagccgacgcccacgcacaactcgactatgccgtcgctcagggcattaaccttatcgacgttgccgaaatgtacccagtacctccgcgccccgaaacgcaagggttaaccgaaacctacgtcggcaactggctggcgaaacatggcagccgcgaaaagttaattatcgcctccaaagtgagcggaccgtcgcgcaataatgacaagggcatccgcccggatcaggcgctggatcggaagaatatccgcgaagcgctgcatgacagcctcaagcgcctacagactgattacctcgatctttatcaggtgcactggccgcagcgcccgaccaactgcttcggcaaactcggttatagctggacggattctgcgcctgcggtttcgctgctggatacgctggacgcactggcagagtaccaacgcgcgggaaaaattcgttatatcggcgtgtcgaacgaaactgcatttggcgtaatgcgctacctgcatctggcggacaaacacgatctgccgcgtattgtcaccattcagaacccttacagtctgttaaaccgcagttttgaagtaggtctggcagaagtcagccagtatgaaggggtcgaactgctggcctattcgtgcctgggtttcggcacgctgaccgggaaatatctcaatggtgcaaaacccgctggcgcacgtaatacgctctttagtcggttcacccgctatagcggtgagcaaacgcaaaaagccgtcgcggcgtatgttgatatcgccagacgtcatggcctggaccctgctcagatggcgctcgcgtttgtacgccgtcaaccgtttgttgccagcactctgctgggcgcaaccacgatggatcagctgaaaactaacatcgaaagtttgcatctggagttaagcgaagacgtattagctgaaattgaagcggtgcatcaggtttatacttatccggcaccataagattaacgccggttaaaaccggcgttaaatattaatgacggcgctgccagatccacagcgccgttattgccagcgcaaacagcgcaccgaagccaatgccaatgggcacgaccgggatgcctatcattaccgccagcgagtaaatgcccagcatcaacaacatggcgctgttttcgccaaggttttgtactgcaatcgcattccccgccccgacgctttttttaccccgctcctgtagcaacgcattgagcggaacgacaaaaaagccccccatcacgccaatcagcatcaacaaggcataggctggcagcagctcgtgttgcagggaaaaaatcagtaccaccacgccaatcaaaatcccggctggcatacagcgtgacacggtttccagcgtaactaacttcgctgccgcacctgcgccaaccacgataccaatcgctaccatcgcgttgagataggtgggcgtagcgttatcggtaatgcccagcgccaccggtacccacagcaccaacaggaaacgcagcgtgacacccgctccccagaataaactggtgcccaccagcgaaaaacgcgtttcaccattgcgccatagcgaggtgcaggcattcaggaaactgcgggtcatgttgatgagattccaggactgccccggacgcgccgccgccagtttgggaatgtagatattggcaacgaccgcaccaccgtaggccagtgcgcatgcggccagggcgacgaggacatgccagtcagccagcacaccaccggctacggaaccgagcaaaatcgccgctatggtagaagcttccattaaaccgttagctttcactaacttactacccgtggttaattcgccgagaataccgtatttcgccggtgaataggctgcagcaccaacacccaccagcgtatagccgagaaacggattgataccaaagcagatactggctgcgcccagcagcttcaggccgttggcaaacatcatcacccggcctttggcgaagctatccgccacctgcccgacaaacggcgcaaaaagaatgtaagcacctacaaacaccatttgcaggatgggctggctccactccggatagaactgcgctttcagtaacgccagagtggcaaacagtagggcattatcgccaaacgcagagagaaactgcgccacgataaccgctttcatccccttcgaccacaacgaagtgttagtgtgcactgactcactcatcgtgttgttccgcttcgtctacccagcttttcaacgtgacaaagtcaggtttgccgctgccaagtaatggcatctgtttcagatagcgaatatcgcgcggtacagcaagctccggcacgccgtgctcgcgggcatactgttgcaacttatcgcgcgtcagttcgttatctgtggtgaaaagcaccagtgcctcgcctttgctggcatcgctcttaatcgcagtggcatggactttatctggcgaaacaccaagtgccagttgttccaccatttccagcgacaccatttcgcctgcaattttggcaaagcgttttgcgcggccctgaatctgcacaaagccctgctcgtcaaaacgcacaatatcgccagtgtcataccagccgcgctccatttcgccgcgaacattctcggcggtgggcacttccagtacacctggcttctccacccgcagatagccgttcattatgttcggccctttcagttgcaggcgtccgccctcttcgataccagggaccgacaacaggcgcgcatccattcctggtagaatacgccctaccgtaccgggtttcgccgccatcggtacgttgatagaaacgacaggcgcgcattcggtcacgccgtagccttcaaggatgcgcaggccaaatttatcctgccaaagctgtttggtactttcttgtaatttttctgcgcctgccaccacatagcgtagacgatagaagtcatacgggttggcgaaacgcgcgtagtgaccgaggaaagtcgaggtgccgaacaacacggtgcaactgcggtcatacaccaactccggcacaatgcggtaatgcagcgggcttggataaaggaacacttctgcacctgtaagcagtggcgtaaacaggcctaccgtcagcccaaaggagtgaaacagcggtaacgccgacataaagcgatcgttggtggtgaagtcggcaatcgttttaatctgctcgacattcgccagaatgcttttatggctatggacgacgcctttcggatggccttcagaaccggaggtaaaaaggatcagcgcctcttcttccggctgctgtttaacctgtgccagacgcggcatcagcaaatgagcgaagatccatactttgtcggcagtggtgacatctgcttttaaatcttccagatagacccagcgcacctgagtaagttgctccggcagatgccagagtttgcctttatcgagaaactggcgggaagtgaagatggttttgatttcagccgccgtaatagcactggtcagcccttttaccccggcagtgtagttcatcattgcgggcatgcggcgacgggcgatggccccaaaaatcactgccgcactgatgcctgcattgggcagcattaagccgatgcgttcgccttcaacactgtatttttcaaggatgcgtccaacaaacagcgttttcgtaagcaatttgcgataggagtctggggtaaagttgacgtcttcgacacatttcttcccggctccgaagcggtacattgcactcagtaaagattcgtacagcgtttcacgcgggcgcaccgccattcgcgcttccatcattatttgatgcagcatttcgccagcgattttgcgacggtcacgggcacgcggcgcatccggcatcgccacctgcgttggtggcaaaatatgcagagtaatttgcgggaacaagcgacgtttaaccagacctttcaggcggctgaagtgcgtaagttccgccccttcaatacgcacaggaataaccgttgcaccagacttcgccgcgacaaaacccgcgccatcgtagattttcatcagcgagcctgtcgtggtgatgcgtccttcagggaaaatcaccactggtcggccctgttccaccagacgtaccagatgtttaatagccataggttgcgtcgggtcgagaggaacaaagtcgataaatgatttcagccaacgcatataccactgttggcttattgaggtgtaaacggcaaacactggacgcacaggtaaaaacagtccaagcaaaatgccatcaataaaagagacgtgattaggcgtaattagaacgcgctcgcccttcagtgcctgggtgtcacccgtaacgcgaacgcgatacaaaacacggcacaaatttcgaaaaaagctaaaaagcattccaactccctttgctctgattcagtaaaagcgaatggagggagattacacgagataaagaacgcgagcgacagtaaattaggtgcgaaaaaaaacctgcgcatccgcgcaggttggtgcaagagacagggtacgaagagcgtaccgaataatctcaccaatcaatacctctgggatcttgattgtggtctgcacgacgactcttcgccagcgagaaaacgcaaaggaatgaagggaaatgcaacgaggtgtgtaaattgtcggttactgttacagattgatgaccggcaaaaaaaacctgcgcatctgcgcaggctggtgtaattcatgtgctcaacccgaagttgacttcacctatcaatacctctgggatcaccactttagcaacctgaagccaaacgccaccagcggtcaatcgcaacagcgtttcgcaaagtgtaaccaaaggtttgcaatctctttttttgtcttacttatttgcgtttggctcacattcccacgatgaaaacacgccaccccttgaaccaacgggcgttttccgtaacactgaaagaatgtaagcgtttacccactaaggtattttcatggcgaccataaaggatgtagcccgactggcaggcgtttcagtcgccaccgtttcccgcgtcattaataattcacccaaagccagcgaagcttcccggctggctgtgcatagtgcaatggagtctcttagctatcacccgaacgccaacgcccgtgcgctggcgcagcagaccactgaaacggtcggtctggtcgttggtgatgtttccgatccgtttttcggtgcaatggtgaaagcggtcgaacaggtggcttatcacaccggtaattttttattgattggcaacggttaccacaacgaacaaaaagagcgtcaggccattgagcaactgatccgccatcgctgtgctgcgttggtcgtccatgccaaaatgatcccggatgctgatttagcctcattaatgaaacaaatgcccggtatggtgctgatcaaccgtatcctgcctggctttgaaaaccgttgtattgctctggacgatcgttacggtgcctggctggcaacgcgtcatttaattcagcaaggtcatacccgcattggttatctgtgctctaaccactctatttctgacgccgaagatcgtctgcaagggtattacgatgcccttgctgaaagtggtattgcggccaatgaccggctggtgacatttggcgaaccagacgaaagcggcggcgaacaggcaatgaccgagcttttgggacgaggaagaaatttcactgcggtagcctgttataacgattcaatggcggcgggtgcgatgggcgttctcaatgataatggtattgatgtaccgggtgagatttcgttaattggctttgatgatgtgctggtgtcacgctatgtgcgtccgcgcctgaccaccgtgcgttacccaatcgtgacgatggcgacccaggctgccgaactggctttggcgctggcggataatcgccctctcccggaaatcactaatgtctttagtccgacgctggtacgtcgtcattcagtgtcaactccgtcgctggaggcaagtcatcatgcaaccagcgactaaccgcagttaaagcaattccagcgccagtaattcttcgatggtctggcgacggcgaatcaaccgcgcctgaccattatcaaacagaacttctggtaacagcggacggctattgtagttggatgacattgatgcgccatatgcccctgtatcatgcagtaccagataatcacctgccttcacttccggcaaggcgcgggtttcaacatttcccccttcctgctgggtaaagacatcgcccgattcacataacggtccggcgacgacggtttccaccgttggcgcgtgttccagagaacgaccatcagctgccagggcactgatatggtggtaactaccgtacattgccgggcgcatcagatcgttgaacccggcatcaaccagcacaaagtggcggctccccatttgtttgacgctccgcacctgagtaattaatacgccagactgcgctaccaggaagcgacccggttcaatttccagtttcacagggtggcccaaatggcgggcgatttgctcacgcgcggcattccacagaccataataatgttcggtatcaaccgcctcttcaccctgttgataaggaacagaaagcccaccgcccgcagaaatagcctgtaaatcctgaccgaattcgatgacctgacgcaccatagcaccacacacctgttccagatgggcataatcaacgccagaaccaatgtgcatgtgaatgccgaccagctgcagatgatgacgttgtatcacgtccagtgcggcgggcagatcggtgtaccagataccgtgcttgctgttttcgccaccggtattggttttttggctatgtccgtgaccaaaccccggattaacgcgcagccatacccgatgccctggcgaaacctggcccagttggtcgagcatatcaacagaacccgcattcaccggaatttgcaattcactgacgcgttcaagcgtcgcctgatcgataacatctgccgtaaaaacaatatcatcggggtgcgtttgcggattgtaacccgccgccaacgcacgctctatttcgcctaacgagacggaatccactttcacgccctgctcacgcattaagcgcaaaatatgaatattggaacaggctttctgtgcaaagcgcaccacatcaaactgtttcagcgctgcaatctgccgacgaataatttgcgcatcgtagacccacaccgggcagccaaattcagcgggcaaacgcagcagattttcggcggtgagatcggtatcggtgctgaacagtgaatgtggcataacaaactccagataagtgcttttttatgattacgccacatcataaaaagaataaaaaatatcgatttatgtcgagtctatgcaaaaatgatatggattaccggattgcgagagagcgctaatggccgccgttaacttacgtcatattgaaatttttcatgcggtaatgaccgccggaagcctgactgaggcggcacacctgctacacacctcacagccaaccgtcagccgcgaacttgcgcgctttgagaaggtgatcgggctgaaattgtttgagcgcgtacgtgggcgattacatcctaccgtgcaaggactgcgtctgtttgaagaagtgcaacgatcctggtacggactggatcgcattgtcagcgccgcagaaagtctgcgcgagtttcgccagggagaactgtctattgcctgcctgccggtcttttcgcaatcttttttaccgcagctcctgcaaccctttctggcacgttatcccgatgtcagcttaaatatcgtgccccaggaatcaccgctacttgaagagtggctctcggcccagcgtcatgatttaggactcactgaaacgctccatacgcctgcgggaacagaacgtaccgaattactctctttagatgaagtgtgtgtgttacctccgggtcatccgctggcggtaaaaaaggtattaacgccggatgattttcagggtgagaactacatcagcctttcccgtactgacagctatcgccagttgctggatcagctatttactgaacatcaggttaaacgacgcatgatcgtagaaacccacagcgccgcgtcagtctgcgcaatggtacgggcgggggtaggtatttcggtggttaacccgctcaccgcactagattatgcggcaagcggtttagtggtgcggcggttcagtattgcggttccgttcaccgtcagcctgatccgccccctgcaccgcccgtcatcagcgctggttcaggcgtttagtgggcatttacaagcggggttaccgaaactggtcacttctcttgacgctattttgtcgtcagctacgacagcataaaagcgacagcatcctcggcatggatcgccgcggtatcaaacacaggcaaaacactgcgctcttctggcaccagtaaaccaatttctgtgcagccaaaaatgacgccctgtgcgccctgttctgcaaggcgagcaatcacttgcgcacaataagcgcgtgacgcttcggtaaattgccccagacacagttcttcaaaaataatctgattaattttcgcccgttcatccgcttcaggaataagacaattgatggaaaattgttccgtcagccgcccgcgataaaaatcctgttccatggtgtaacgcgtacccagcagcgccacacgagtcattccggccccggtaattgcacgtccggtggcatccgcaatgtgtaagaaaggcagagtgcaacgtgactcaatggcatccgccactttatgcatcgtattggtacatagcacaataccttctgcgcccgcccgctgtaagccaagcgccgcctcagccagaatgtccccggttttatcccattccccgcgacgctggcactcttctatttcatgaaaatcgacgctatgtagcagcacttgcgcagagtgaagcccaccaagccgctgtttaatgccttcatttatcaaacgatagtaaggaatggtggattcccagctcattcctcccagcaaaccaattgttttcattcctctctcctgatgtgtgttaccgcaacaaggctgaataaggaacgagacaaacgcctcaacggccaagtgcccaatctctattaacgaaaaaagggccggatgtacagcacatccggcccgtgaaatcagacgccgatatttctcaacttctcgcctgccatcagtttgcgttcgatatgttccagcgtgacatttttggtttccggaatgagccagaaagtaatgcccacaaacgcaatgttcagcgcagtgtagagccagaacgtaccggcagcgccaatgctatcaagcagtgtcaggaaggtcgcgccgataatcatattcgacacccagttcgtggtggtcgaacaggtaataccgaaatcgcggcatttcagcggctgaatttcagagcacaggatccacaccactggcgcggcgctcatcgcataaccggcaatacacatcatcgtcatgccaacagagagccaggacaagccactggaagccgtaccgttatcaaactgcatcaggcaatagcccagcaccagagtgcctaacgccatcacgctgaaaccaattttcagagccggtttacgccctgctttatctaccgtaaacaccgcaataaaggtggcgaacataaaggtcagccctacgaccagagtcgcaatcatctgttgttctgtggtcgtaaagcccgccattttgaagatacgcggcgcgtagtacatgatgatgttcataccggtaaactgctgcatcgcctgcaacaacataccgagaaacacagcacgacggacgttacggttgatcttaaacagtgcccaaccgccctgttttaacttcaggctttcacgaatttcgttgagttcttctcgcgctttttccgacgtatcgcgcagcatacgcaatacttcttccgcctcaatatgacgccccttttccgccagccagcgcgggctatttggcaggaagactaccagaataatcagcagaactgctggtaaagcaagaacccccaacattgcgcgccagttaccgctataactgaacgctgtatcggataaaaacgccagcacgatgccgagtgtgaccatcaactggtacatactgatcatcttaccgcgaacgttttcacttgccatttcagaaagatacagaggagcggtgtaagacgcgatcccgacagcaatgcccagcaccacacgagcggcgattaacatctctacgctggtcgcaaaagcggaccctatagaaccgagtacaaacaggatggcccccgccatcaggctgtatttacgccccaggcggaacgacagccaaccattaaacagcgcaccaattgctgcaccgagcatcatgctactaaccacccattcctgcaaacgactggtcagcacaaagtgatcggtaatgaacggcaacgctccggcgattacgccgatatcaagaccaaataacaatcctgcgaccgcagcagctaccgaaacaaacatattcatacgccgcgtatcccgcaaagaacgtggcgttaaagcagattccgtattgatagtaaccattttttcctgccagcagagagtaagacatagtgaaaaaatacgtgaacaactcacgcaggtgtcaggtcggaaacagcataaatatggattaaattgctgcgacatgtcgttatgtgatggatattccaattttcaaattaagttgaattattgagattattattaaccacctaattttacagcagataaaattcataaagttcattaattgataattaatatggattatttcataaccatgatatggattatgatgatctacaggtataaaaaaccctgccatgcggcagggtcataaaagtaagaagaatgaattaacgcgccagccaaccgccatccacggcaatggtataaccattcacataatctgaagcgctggaggcaaggaacactatcggccccatcaggtcactcggcagtccccaacgaccagctggaatgcggtcgagaatttccgcgctacgttgttcatctgcccgtagttgttgagtattgttggtcgccatgtaacccggggctatcgcattaacattaatgttgtgtttagcccattcgttcgccatcaatcgcgtcacacccatcacgccgctttttgatgcggtataagaaggcacacggatcccgccctggaaggagagcattgacgcgatattgataatcttgccgccattgccttgcgcgataaagtgtttcgccgctgcctgagacatgaagaatacgctcttgatattcaggttcatgacatcgtcccagtccttttcgctgaactcgagagcatcttcgcggcgaatcaatccggcgttattcaccaggatatcaatatgaccaaactccgctaccgcgcgatccagcagtgctggaataccatcaatctttcgcagatcggcggtcaggcttaaaaaacgacgccccagcgctgtgacctgctcgatggtttcagtcggttcaacgatgttaatgccaacaatgtcacagcccgcttgcgccagccccaacgccatcccctgacccagtccagtatcacaaccagtgacgaccgcaactttaccttcgagagaaaatgcacttaaaatcataacaataccttattcgtttatgcccacaactagcgcaaatctttaacggccacatggtccatatcatcaaagacctggttttcaccgaccatgccccagataaaggtataagctttggttccgacaccggaatggatcgaccagctcggggagatcaccgcctgctcgttatgcatcacaatatgacgcgtttcttgcggctgccccatcatgtggaaaacgcaggcgtcatcatccatattgaaatagaaataaacttccatccggcgctcgtgggtgtgacacggcatggtgttccacaagttacccggagccagctccgtcagccccatactcaattggcaggtttccagtacatccgggacaaaatatttgttaatcgtgcgacggttactggtgaggttatcgcctaacgtgactggagatacttcgtccggtgtgacttttttggtgggatacgtcgtatgcgcgggtgcgcaattgtaataaaacttcgccggagtgccggtatcaatactggcaaagacaacttcttttgcacctttaccaacatacagggcgtcgcggtgaccgatttcatagcattggccatcgacagtaatcgtaccggcaccgccaatattgataacacctaactcgcgacgttcaaggaaatagcttacgccgagttgtttaccaacttccccgccaacggaaaccgttttagttatcggcataatgccgccaacaataattcggtcaatgtggctgtaaaccatggtgtactcatcggcgacaaataccttttcaaccaaaaattcattgcgcagcccttgggtatccagcgtttttgcgtgcgcactgtggatgctctgtcttacgtccacatcaacctccgataatcagtgaagcgtgaaaatagaaaacgatagtgaaacactgtttcgttttctctataaagggatgatatgcccatgggctagggttttcaattaaaaataaaacaatgtttcatttttaagttaaggattaaaaaaagtgcagtgtcgatcacgaatatgtcatgagaatggaaaaatgagggagcccagaaaatgtatgtcgacttgccagccatcattattcaacagattaatgacggcagatatttatcggtaaggaggaaatgcagagctattcgtcacgttcaatggtcaatgccacaccctggcccccgccgatacaaagcgttgccagtcctttgcgggcattacgtttcaccatttcatgaaccagagaaaccaggattcggcaaccggaagcgcctatcgggtgaccgagtgcgatcgcgccaccattgacattgacccgacgctcatcccactcaagcatcttgccaaccgaaagcgcctgtgcagcaaacgcttcattagcctcgataagatcgacttcagccaactgccagcctacacgctccaggcaacggcgggtcgcatacaccggcgcaattcccatcaatgccggatctacaccaacgctggcaaatgcgcgaatgcgggccagcacgggtaaattcaacgctcgtgctttggcttcgctcatcatcattaccgcagctgcgccatcgtttatggatgatgcattacccgctgtcacagaaccgagactatcaaatgaaggatttaaacgggctaagccttctgcgctggcgtcagtgcgtggctgttcatcggtatcaacaaccaacgtctgcccgttactttgggtcattaccgggacgatctcatctttaaatcgtccggcgtcaatcgccgctcgcgctttttgttgcgagctaagtgcgtaagcatcctgcaactgacggctgatgccatattcgcgagccagattttcggcggtgacaccaatatgataatcattgaaggcatcccacaacccatcatgcacaagactgtcaaccaactggctattgccaagctgtgcaccggtgcggctatcagtcagaacatgtggtgcgcggctcatgttttcctggccaccggcgatgacaatatcagcctcgccacactgtatcgcctgagtagccagatgcagtgctttaagcccggaaccgcaaacgtcattaatagtgattgcagaaacgctattaggcagaccacctttaatagccgattgccttgccggattctgccctgcccctgcagtcaacacctgaccaagaattacttcatccaccgcatatgcaggaacgccggtacgttctattaacgctttcacgaccagactaccaagttccacggcggaatgacccgctaacgcaccacgaaagcagccgataggtgtccgtaacgccccgacaatcacaacgtctttcatcacaacctcgcaccaattaacagtgcaatagtaaatgattgttaattacagttatcttaattgtttaaaaaaagtgatttttatcacaaaggaaatatgcctgagcagcagtcagagacataactggcacgtaaggtttgcaaccactaacccaccaatagaggggtagatagggcgttaatctcccatacttaacctggtttatggtaaattgccctccattttgtttaatttgtagatgatacgttcagataatgtctaatatttggtctaaagaagaaactctgtggagtttcgcgctctacggcacagccgttggtgcaggcacgctcttccttcctattcagttaggttcggcaggggctgtggtcctgtttattactgctctggtcgcctggcctttaacatattggccacataaagccttgtgccagttcatcctctcatcaaaaacatcagcaggtgaagggataacgggcgcggtaacacactactatggcaagaagattggtaatctgattaccacgctgtacttcatcgccttttttgtcgtcgtgttgatatatgcagtggcaattaccaactcacttacggaacagctggcaaagcatatggttattgatcttcgcatccgtatgttggtgagtctgggtgttgtattaattctgaatctcatttttctgatgggacgtcatgccactattcgggtaatgggatttttggtattcccattgattgcctatttcttatttctttccatttaccttgtcggtagttggcaacctgatctattaacaacccaggtagagttcaatcagaatacccttcaccagatatggatatcgattcccgtgatggttttcgcctttagccatacgcccattatttctacgtttgccatagacagacgtgaaaaatatggcgaacacgctatggataaatgcaaaaaaattatgaaagtcgcttatctcatcatctgcataagtgtactgttctttgtctttagctgcctgctttctattccaccttcgtatattgaagctgctaaagaagaaggggtcaccattttatcggcgctttctatgctgccgaacgccccagcatggttgtcaatttccgggattattgtcgcagtagttgcgatgtcgaaatcattcctgggtacgtactttggcgttattgaaggtgccacagaggtcgtcaaaacaacactacagcaggttggtgtaaagaaaagtcgtgcatttaaccgcgcactatcaattatgttggtatcgctgattaccttcattgtttgttgcattaacccgaacgcgatttcgatgatttacgcgatcagcggcccgctcattgccatgatacttttcatcatgcctacgctgtcaacgtatctcatcccggcgcttaaaccctggcgttccatcggaaatctgattacgctgatcgtgggtatcctgtgcgtatcggtaatgttctttagctaatatcagttgtggatggttcaaaattgctacaattttgaaccattccatttttcataatattcatttgttattattccaccctatcacttctctcgtcatatcctagtattatcagttagttaaacacacaaagagatctgaacatcttaaataagactatttaagatgcataacttagattcgcaagatatcttctggtcattcaaaaacaatttgcgatatagatattcttataccatgagatagttatctggaccgctctcaaccatgcaagattaaatcagtgaaacataatcatatttgataacgagaaatgcatttttaaatgccttactcagaattatagcaaatacagattaatcgcaatttttcccggcaaaattacaaaatcatggtgtattgacatcatcaataaccaatgaaattatgcaattatatacggatagggaggttcttaacatggggctttgtagtcgttataaaagtcttacatgcaatagttgctcaatgcattgccaaataatgccagaagagtcaccgcgtttgcagtattgcgcaaactcgtgtttttgtatgtggcccgaagaaagttcatattttaatcgtggtgtggtagaaggtatcttaacaaaaaaccacaatgcgagattaagcggatatatttttgtcgatttttcagtaagttttttacgtctattccttgaaaaagactggattgactatcttgcaagtactgacatggggattgttttagtcagcgaccgcaatatgcaatcgttagctaattactggcgaaaacacaactcagcaatatctgctgtcatatataatgatgatggtcttgatgttgccaatgaaaagatcagacaactatttattggtcgttatttatcatttaccggaggtaacacattaactcagatggaattcaccataatggggtatatggtttctggttataatccatatcagattgctgaagttctggatatggatatccgtagcatctacgcgtacaagcaacgaatcgaaaagagaatgggtggtaaaataaacgaattatttattcgttcacattcggtccaacattgatactcaacgaccagccagaatcatactctgtttatacgggcatttattgaaatgtccgtattttataaataggccgtcccctcaagagtaaacaccatagtatttaaaaccatcacacgaaaaattcagaagcattacgaaatatgaatttacaaacaatagtggcataaatgttaaccatgttaatttacgtaaagttttacgttgcaacattaaagcctcatttcaatcatcatgataaatataaaattaatatatatttatgccgtaaataccaatatacttagcaaactatgtgatctccatttcgattgatttagtgtttattgacgtatgtactggattattaacgataatatcgagttctggcctgagcaccgaaaattaatatcggtacataacgccgatcttaacgtcgttctgacaacgccagccagtcgatgtttatcacttctacttgaagcttttcctgatgtggttgcacaacaagattttttcaccagagtctgggaagaagaaggtatgcgtgtgcctactaacacgttatatcagaacatatccattatcagacgcggatttcgcgctgttggtgatactacccactcgctaattgcaaccgtgccgagaagaggattcaagatccataatgacattaacatacaaaatcatgtaataaactcgtcaacagacgcacatacacacaatgccccacctgccataaaagttaatgcgggatacaaagagagcattggtggcgcaaagaatttcaataacaaaatcctcaaacatataaaaagtcatctaattatgttgagcgcatttgtcataggcgcatattctgcatattggctatggaataataatcaaccgaagccatttttcaaggattacaagactgttgcggaaattaatggctgccattttaatgtaacagaagatacaattgatgggttgaaagagttcgataaatataaaacacggatactggattcggggattaactgtaaaaaacatccgtggttatacttccctcttgcaaaatcctcaccggggatgattgttatggcatgcaataaaaactataaccaacatgaagtggcaaactgtttaaccctgtcttaccgtgaggttaatcgtgattgattataaaaaaaacttattatttattttagtttttatcagtgggtttattctcttcactgtctattcttacactgcagaaaaaatgatatataacgaaacatgcactgcaaattgggtaatttttaatgaccagggacgagcaaatcttaccatcgactttatgtataacaaaaaaaataaaacaggaactgttgcgttgagtggaacctggcaacaaggtaacagagaaagtaaatcaatacggcgaaatattgaatacacatggattgaaaactatgacacagcccatttaacatcaaagaaagttaataagtttgagattatggatcaagttgatgatgatagacttgcacaacttattcctgatttttatgtctttccagaaaaaagtgtaagctataatatactaaagcaaggtaagcatgcttttattttgagcattggtaacagagcaataatgcattgtgcaaggtaaactaaaatagataacaaaaagatggaacctcgttaatcataaaacaataaaattaaatattctcgcagtatatggcagtctaaagcatcaaagatttgatcaacatctttcattttagacatctccttgcaatgtaaaatatcatgtatcaacaacatctggtgcaaatccatgagtcgaactcgacattcatcttagctcgattattattccttcgtacagtcgatgtaaacaatacagaaagaggattattaagaaccagtttactcagtgaatcaatagaggaaaggactaacgtttctttaaaagaattgatttcatcatctgttaaactaaactcatcattgacagatcgtgagatataactgtttttaactttactctttacgttgactttattgacagaattaacattcacatatcttgaatttaatgtccatgatgttgtttgcgtgagaacattctcagcattaaggaatttttttaacggaatccttggtttctttttcgagtccgaatttacaatatcatgcatatagaccatttcatgaatctgcgaaaattcaatgtccattgtatacctcacatttttaccgtgactcgatgttactgttcaataatcaccttccatcaatactaaaattaatacccctaatgtgccgataacaaatatagtcattctacgtaacgtctccataaggtgatatttgacattatcagaagctgcgaattcggattttgctctaatcaaatgagagaaatgtaaaatgaagccacgaaatattaataatagcctaccactgcaaccattagttcctgatcaggagaacaaaaataagaaaaatgaagagaaatccgttaatccagttaaaatcacaatggggtctggtttaaattatattgaacaagaatctcttggaggaaaatatctaacacatgatttgtcaataaagatagcggatatttctgaagagataattcagcaagcaatattatctgctatgagcatatataaattttcgataacagatgatttaatgagtatggctgtaaatgaactcataaaactgaccaaaatagagaataatgtagacctgaataaattcactactatatgcacagacgttctatccccccgcgtcaccagacataataaagaaaaaaacaaacgacattctacccttctcaaaaatcccctttttaattttcattgaaaaaatggcaattgatactatgaatccaggtcatacacattaaggcatttatgtaatgtcgtaattaagataactaataaggtgaatattagtaaaacaactaatgatgttattagtttgtagtgaacagtacttttaccaataatgaaaaatataccataagcaatgcaagcttaaaactcataatttaaaaaagataaatataaaaatatcaatgagtcaatcaataataatttggcatcacgagacacatcacagaggaatattatgagcacagaaacaattgaaatattcaataatagtgatgaatgggcaaatcaactaaaacacgcattatcgaaaggagaaaatctggcattactacatggtttaactcctgatatccttgatagaatatatgcatatgcattcgactaccatgaaaagggtaatataacggacgcagaaatttattataaattcttgtgcatttatgcgttcgaaaatcatgagtatctaaaagattttgcatcagtatgtcagcccaaaaagaaatatcaacaagcatatgacctttacaaactaagttacaattacttcccgtatgatgactattcagttatttatcgtatgggtcaatgtcagattggggctaaaaatatcgataacgcaatgcaatgtttctatcacattattaacaattgtgaggatgatagtgttaagagtaaagcgcaggcatatattgaactcttaaacgataattcagaagataatggctaagcattacaatcatttggttaaatttgctggttatagtgcagttaaccactataaccagcacctcttatgttttcttaaatcagcatcttaaaacagttaagagcatactataaatcattatttttcaatgcgttagagaacaatctactttatcaaaattgaataaggctatttcagattacatcactgaattcctaagataaattagtgaacacaaccatagatatgtcaaatgtaatttcctgtagcgttaatgacacataaatatgaatagccataatttctattgcttaagcaggatgcaagaaaccaattttttcatagaggttaactaatggacttagaaaataaattctcatatcattttcttgagggattaacgctcacggaagatggaattcttactcaaggaaatgagcaagtttatattccacagaaagagttaggtgtattaatagtattacttgaatccgctggtcatgttgtactgaaagatatgatcatcgaatcagtatggaaaaatattattgttagtgacgagtccctgacaagatgtatctattctttgcgctgcatttttgaaaaaattggctatgatcgttgcatagaaacaatctaccggaaaggttatcgtttcagcgggcaggttttcaaaactaaaattaatgaagataatacttcagactattccatagctatattccctttcactacttcattgaatacactggatccattaatacttaatcaggaattagtgcaaatcatttcaaataaaaaaatcgatggtctctatacctatccgatggctgcgacaaatttttgtaatgatcacatatctcaaaattcattcttgagcagattcaagccagattatttcgttacaggaagaataaaccagaataatgcagtgaacactttatacattgagttgatcgacgctaaaaaccttttcctcatcgccagtaatcatctccctgttgatgaactacataatacatcacaatttattatagataatatccttcaaacggtacataaaccagaacgatctgtaagattagctaagcaggaccaaggatataagaatcattatttatcagatgaaatgttagccggaaagaaagaactttacgacttcacccctgaaagcatttacagggccatgactatatttgatagattacaaaataaaagtgatatacagacgctaaaaacagaatgttattgccttctagcggaatgccatatgtctttggcacttcatggaaaaagtgaacttgaacttgctgctcaaaaagcattagagcttttagattatgtatcagacataaccactgtcgatggaaaaattttagctattatgggactgataactggtctgtctggacaagcaaaagtatctcatatcttatttgaacaggctaagatacactcaactgatatagcctctctctactactatagggcactagtccactttcataatgaaaaaattgaagaggcaaggatttgtatagacaaatcactacaactcgaacccagaagacgaaaagcagttgtgataaaagaatgtgtagatatgtatgtgcctaacccgctcaaaaacaacattaaactctactataaagaaactgagagtgaaagccatcgagttataattgacaacattttgaaattaaagcagctgacgagaatttgtatgcgataaatttttattgacgcaattttattatttagatgtatgcaacttgttatttaaacaacagagataaaaatatctaagatattcaccttattgcaagatatttaaaatgctctagagttaaaagtatgatgtaaagaccattggcctggacaattaaaaaagggagctttatgactaatccaatcggtatcaataatttatctcaaagttcaaatatagcgaatgcaacgggtgatgaagtcgtatcattagataaacacatcaacaccagtgctactgatacagatcaaatacaagcatttatagtttcaacatggatggcgccttttcaaaatgatatgtattcagaagataatcctatctcaccttactataaaattgagtggtagacgattgaccaaataaatcataacgagatacttttataatagtatctcgttcctttcattcaatcctcacacatgaaaaaatatgcgctcaccacaaagttaaattcttaaccatcttcacgttttgtatatttattacaaaaatgtctttcgccagcaactcttgctctaatgaagcaggaacaatgttcagaatcgaaccaaatttaattaaagctatcgctcttgttgaaagcaatctaaaaaaggatagcataggcaagaacagagataagaataacaatataaagagtttagattattggttaatgcagataaaccagatgcatattcccctgttaaaaaaacgtggaataataaaagatgaacgagatttgttagataacccttgtctgaacattaaaataggaaccgagattttatataaccatttttcacgttgtggagtaacgtggcaatgcctggggacttataatgcgggttttgcaatggataaccaaaaaaagagacagcaatatgccccaaaatatatattgtatataccaggcttaatgaactagacaatcgtaaggcttcagcaaaatgagcctaaagcctcttttttttatatagtgcaaacacccatacgtaaagctgttttgatcaactcgataccactgtgaacatctaatttcttcatgatattgagtctatgagtttcgactgttttcctgcttaactgcaagaaattagcgatttctttgtttgttttaccatcagctatgagttgtaatatttctgactcacgatttgtaagttgattatcagaggaatacctggaagatattttttcacaatccatatgtacactatcaaaataagtgtaaccattactaatcgaatcaatagcacgatttagtttcgccgggtgactggttttccatacgcatcctttcgcacctgcttcaagcaattttattgaatcaatatacggcatctttgctacaaatgtaataatatgagcatctatcttatgcgatttaacccattttacgagttcggcccccatcattccacctgcaaattctcctaaaataaatatttaggctgtagatttgttacactccgctatagctttcttcagatctttatagcccccaacaacctcatataaatcaggataatgtccgagaaatccaattatcccatcaatcataaacggctgctgatctgaaactacaattttaatttttcccatatattcatcctgagtgtaaatgctttaacgcattcatttataatcatcccttccattattattataagcaaaatccaaagaatacattgatgaaataataatgaaatataattaaaaataaaatttttgcgtaaaaaaataccacaggcattaaaaaatcatgagatgattaaaatattacaattagattatattcaaatcattaaacttgagccagggagctataagtcctcagggcttgccaaaacagaattattcatatccaaagaatgtgtttcaaacattttttcaactaaataatgtctggcttgttcgcagatttcgttaaccttgtcaggggagaaacaatgattattaattaaatattgctcacaattatccacaaattcctgcggactaaattcagcaataaattgatcggtaaaaaacacaaaacgcttatcatcatgaaatgtaatatggacattccatattgatttgtcgacaaaatatgactctacttcaagagacttatctttgaaactggtaggtatatggagatttacaggacctgatattgatggtaattttgttacccaactttcaaaaattttgataaaaacatcaacttcttctgaaggttttaacaatatactcttcagatcgtttatcatgtttattcttttttttcaagttctgagcatagcaagcttatcaagggtataaaattatccatctcatcaataatgccttttgtatagccatcataataaccttgaataaatttttcttctctcttttcctcaatactctgaatttttgcggtggtttcaagaaggattttttctttaagagaaactatttctttcaatccatcagaaatttttcttttaatcacaacaccatttgcaggagattttatcaagctcatctctattttttttcgcataaaatgtaattctctctaaaagtgttgatgcaagtggtaacggcgattgtatgtggtcaacaaaatcaggaaataataaattaaatcgttgctgcattgccaatggttgttgccttatatagggtaacaacgttgaaaaaccacatgtgatgatattgtgatagttagcgatgccgggtttgtatcgtgccttttcatttatttccagcggtatagctgataaataatcccttagtacatcaggaaccttataaaaaaacccgcgttctgcaaacctttctcgataaaagtgacaaccactgagtaaacagatcaatggaagtaaattccaattgtttattggatttgcccctatatttccagacatctgttatcacttaacccattacaagcccgctgccgcagatattcccgtggcgagcgataacccagcgcactatgcggatgccattcgttataatgctcgaacgcctctgcaaggttctttgctgccgttaacccgtctggtttgggcatgatactgatgtagtcacgctttatcgttttcacgaagctctctgctattccgttactctccggactccgcaccgccgtgttcttcggttcaagtcccaacatccgggcgaactggcgtgtttcattagcccggtagcatgaaccattatccgtcagccactccactggagacgacggaagatcgttgccgaagcggcgttccaccgctcccagcatgacgtcctgtactgtttcactgttgaagccgccggtagtgaccgcccagtgcagtgcctcacgatcacagcagtccagcgcgaacgtgacacgcagtctctctccgttatcacagcagaactcgaacccgtcagagcaccatcgctgattgctttctttcacggccactctgcctgtatgtgcccgtttcgatggcggtacagcaggttttcgctcaagcaacagcgcattctggcgcatgatccggtaaacacgtttggcattgatcgcaggcataccatcaagttctgcctgtctgcgaagcagcgcccatacccgacgataaccatacgttggcagctctccgataacatggtgtatacggagaagcacatccgtatcatcagtgtgacgactgcggcggccatccatccagtcatcggttcgtctgagaatgacgtgcaactgcgcacgcgacacccggagacaacggctgactaagcttactccccatccccgggcaataagggcgcgtgcgctatccacttttttgcccgtccatattcaacggcttctttgaggagttcattttccatcgttttcttgccgagcaggcgctggagttctttaatctgcttcatggcggcagcaagttcagaggcaggaacaacctgttctccggcggcgacagcagtaagacttccttcctggtattgcttacgccagagaaataactggctggctgctacaccatgttgccgggcaacgagggagaccgtcatccccggttcaaagctctgctgaacaattgcgatcttttcctgtgtggtacgccgtctgcgtttctccggccctaagacatcaatcatctgttctccaatgactagtctaaaaactagtattaagactatcacttatttaagtgatattggttgtctggagattcagggggccagtctaaacttgctcttttcttctggtgtttatctttgaaagatttgtaggataaataacattaagtaaagccgcatcggcttctctgtaatgtttatctttttccagataacctggggattctccccctaaatcaagctgtaacgttattctttcataacctttatctatgaggtggttcaacctcgttgttgaaagagtttcatccagttcattgactttagcttcgcgtagtaaatcagagacaaaaacagagtctttcttcgagagtaggtttgacaaacgttccagtccagaggtcaccagtgcaacggaagatgtgtttaatcgggcatcttcttcccatgctcaggaatcttccataacatagaaattggctttatccagataagcaatcagcagcgcaaccgactttaatcggtcacctttttgccaatcttcagcgttaatagtaccagtgttgattgcttgtataaggagatcaaggtaaagacctaaagcatcattttgtttatggttccacagctgcggcttgccttcttcctgcacatctgccatcacgggggagttgctgtcaaatcggatatgcacagcattcatttgcacgggaattccatccagtcgttttgggttgctaatgacgtcctgcatccgcttaatctggtcgggcgtagacatataatcccacagggtgagcagaaccttttttgcggctacactatttccctgatctgatactaatgccatatagccccataaactatccctcaaccagacagcatcatagtgggtttctgccgctgttttgtcatcttcgaaagtagaagcaagaataaacgttccccagggtttctccgtcaacgttaactttcgtgtgttttctgttaatgttagcaatccttgaatttcgtctttggtatagtggctctttatttcattttgtaatttggctgagtgaatcagaagacgataattaggatacttatctggatttaacgataaataacttttatctgttgctgcccccgtggaattaagaatgttaaatacagattcactcgtcacttctgcccctgtcgcctggcatgtgccgcacgaaaatataccagcgagcagaagagttaatgcagatttccctttcataaaatattccatcaatcgtttgttaaaagcgtagataaccacttatttaacaacttgaaaataaggtgttttacctgggttgttacaaaaggattgcattgcgtaaacgctttttatttacaacaaaatggggaagtattacggcgaagataaattggagcgggcgaagggaatcgaaccctcgtatagagcttgggaagctctcgttctaccattgaactacgcccgcttcgagatgcgtaaggcattataaaccttacgctctccttagcaagtgccacgctgctgactgctgattaattcgccatcagcattttggcttgctgccctgaggcggcaagtaacgtagcggatcaattgccgttgcacggtaacgaatctggaaatgcaggcgaacagatgccgcatccgtgctccccatagtggcgattttttgcccagccttcacgctttgcccattatttaccagcatcgtgtcattatgggcgtaagccgtaatgtaatcttcactgtgtttaatcatgatgagattaccgtagccacgcagctggttgcccacatacaccacctttcctgcacccgcggcgtaaataggtgtaccccgtggagctgagatatcaatccctttattgccgccatctgctgtcgaatacggcatgataactttccctgtcgttggccataaccaacaacgttgccctactggcggccaggatgatttcggtaccgctgatgacggtgtaaccgatgcggttttggtcgttgatttggcggttgatttacgtgtaatactgctacttttcgccccacccagttttagtttctgaccaacttcaatggtgtaagggggggaaatgccgttcagtcgcgccagttcttttacgctggttcccgtggtgcgcgaaatacgatatagcgtatccccccgtttcacggtgtaaacggagccggaatacgttcctgtatcggatgatttgctacccgaacagcccgccaaaagcagtccaaccgataacaacatcacgatacccagagattttttattcaggcgtcccgcactcaaaatctttcctcgcttaaaaaacaagacgccttatcatagcagccagcctcttgatacccaatctcttgcttctggaaaaacgtggtaatagagaaagaggttaatttcatttggcaaagggaagtatcatcagcaaaatattcgctgtagaggtatcgaacttcctgactttttaccctatttcccatcctgatgcgtaataatcccaatttatcacattgattttatcgccactcatattgatacgtatcactgcccctattcagagtcctgtttcgtatcatatctgtgtttttttaacgtcatcacacttcctacctcccctaacgcttatcgtcgtttctggcgtaaatcttgcctgcttagactaaatctttgccataagaaccaaatgttcaaatcgaggggatttctatggaagcgcgggaagcaaccgctacgggtgaatcatgcatgcgcgtcgatgccattgctaaggtcaccgggcgggcacgatatactgacgattatgttatggcgggcatgtgttatgcgaaatatgtacgtagccctatcgcacatggttatgccgtaagtattaatgatgaacaagccagaagtttgccgggcgtactggcgatttttacctgggaagatgtgcctgatattccattcgctacagctgggcatgcctggacacttgacgaaaacaagcgcgataccgccgatcgcgcactgctaactcgccatgttcgtcatcatggtgacgccgttgccatcgtcgtggcccgcgatgaactcacggcagaaaaagcggcgcaattggtcagcattgagtggcaagaattacccgttatcaccacgccagaagcggcgctggcagaagacgctgcaccaatccataacggtggcaatttactgaaacaaagcacgatgtcgacgggtaatgtccaacaaacaatcgatgccgccgactaccaggtacaggggcactatcagacccccgttattcaacattgtcacatggaaagcgtaacatcgctggcgtggatggaggatgactcgcgaattaccatcgtttccagcacccagatcccgcacattgttcgccgcgtggttggtcaggcgctggatattccctggtcatgcgtacgagtcatcaaaccatttgtcggtggcggttttggtaataaacaggatgtactggaagagccaatggcggcattcctgaccagcaagcttggcggcattccggtgaaagtttcccttagccgtgaagagtgtttcctcgcaacccgtacccgccacgcttttaccattgacgggcaaatgggcgtgaaccgcgacggaacattgaaaggttatagtctggatgttctgtctaacaccggcgcttatgcatctcacgggcactccatcgcttctgcgggggggaataaagtcgcttacctttatcctcgttgtgcctacgcttacagttcaaagacctgctataccaacctcccctcggctggtgcgatgcgtggttatggcgcgccacaagtcgtatttgccgttgagtctatgcttgatgacgccgcgacagcgttaggtattgatcctgttgaaattcgtttacgcaacgccgcccgcgaaggagatgctaatccgctcacgggcaaacgtatttacagcgcagggttgccggagtgtcttgaaaaaggccggaaaatctttgaatgggaaaaacgccgtgcagaatgccagaaccagcaaggcaatttgcgccgcggcgttggcgtcgcctgttttagctacacctctaacacctggcctgtcggcgtagaaatagcaggcgcgcgccttctgatgaatcaggatggaaccatcaacgtgcaaagcggcgcgacggaaatcggtcagggtgccgacaccgtcttctcgcaaatggtggcagaaaccgtgggggttccggtcagcgacgttcgcgttatttcaactcaagataccgacgttacgccgttcgatcccggcgcatttgcctcacgccagagctatgttgccgcgcctgcgctgcgcagtgcggcactattattaaaagagaaaatcatcgctcacgccgcagtcatgctacatcagtcagcgatgaatctgaccctgataaaaggccatatcgtgctggttgaacgaccggaagagccgttaatgtcgttaaaagatttggcgatggacgctttctaccaccctgaacgcggcgggcagctctctgctgaaagctccatcaaaaccaccactaacccaccggcgtttggctgtacctttgttgatctgacggtcgatattgcgctgtgcaaagtcaccatcaaccgcatcctcaacgttcatgattcagggcatattcttaatccactgctggcagaaggtcaggtacacggcggaatgggaatgggcattggctgggcgctatttgaagagatgatcatcgatgctaaaagcggcgtggtccgtaaccccaatctgctggattacaaaatgccgaccatgccggatctgccacaactggaaagcgcgttcgtcgaaatcaatgagccgcaatccgcatacggacataagtcactgggtgagccaccaataattcctgttgccgctgctattcgtaacgcggtgaagatggctaccggtgttgcaatcaatacactgccgctgacgccaaaacggttatatgaagagttccatctggcaggattgatttgaggataacatcatgtttgattttgcttcttaccatcgcgcagcaacccttgccgatgccatcaacctgctggctgacaacccgcaggccaaactgctcgccggtggcactgacgtactgattcagctccaccatcacaatgaccgttatcgccatattgttgatattcataatctggcggagctgcggggaattacgctggcggaagatggctcgctacgtatcggctctgcaacgacatttacccagctaatagaagatcctataactcaacgtcatctcccggcgttatgtgctgcggccacgtccattgctggaccgcagatccgtaacgtcgctacctacggtggaaatatttgcaacggtgccaccagcgcagattctgccacgccaacgctaatttatgacgcgaaactggagatccactccccgcgcggtgttcgtttcgtcccgattaatggctttcacaccgggccgggcaaagtgtctcttgagcatgacgaaatcctcgtcgcctttcattttccgccacagccgaaagaacacgcgggcagcgcgcattttaaatatgccatgcgcgacgcaatggatatttcaacgattggctgcgccgcacattgccgactggataacggcaatttcagcgaattacgcctggcatttggtgttgccgcgccaacgccgattcgctgccaacatgccgaacagactgcacaaaatgcgccattaaacctgcaaacgctggaagctatcagcgaatctgtcctgcaagatgtcgccccgcgttcttcatggcgggccagtaaagagtttcgtctgcatctcatccagacgatgaccaaaaaagtgattagcgaagccgtcgccgcggcggggggaaaattgcaatgaatcacagcgaaacaattaccatcgaatgcaccattaacgggatgccttttcagcttcacgccgcaccaggcacgccgctctcggaattactccgcgaacaaggactgctaagtgtcaaacaagggtgctgcgtgggtgaatgtggtgcctgtacggtgttggtcgacggcacagcaatagacagttgcttataccttgccgcctgggctgaaggaaaagagatccgcacgctggaaggtgaagcgaaaggcggaaaactttctcatgttcagcaggcttatgcgaaatccggcgcagtgcagtgcgggttttgtacgcctggcctgattatggctaccacggcaatgctggcgaaaccacgcgagaagccattaaccattacggaaattcgtcgcggactggcgggaaatctttgtcgctgcacggggtatcagatgattgtaaatacagttctggattgcgagaaaacgaagtaaaaggatatccggcctgaattcaggccggattcactgaggttatgtgtttaacaactcatatttcttaatcttgcgatagagcgtagcaatgccgatgcccagttcatcagcaacttgcttcttgctgttatgacgtgaaagcgcctcgcggatcatttgcttttccatctcctccagcgccgtgccgcccgcatcatcgagtgacaggtgcgcctcactgacctctgttacatcactttgctccgttgtgccattattcagcagatttggcggcaatagcgtgctgtcgataacttcacctgaaggaaccacgttaaccagatattccatcaaattgcttaactcgcgcaggtttccgggccaacgatgcttacgcaatatttcgacgacatcgggagcaatgccaggataaaccgatcccagacgacgggtatgcagatgtaaaaagtaatgcaccaatagttcaatatcttcctgacgttcacgcagcggtggcagagttatcgggataacattaagtcggtagaagagatcttcgcggaatttaccttcggcaatgaactgggccaaattctgattagttgcagaaatgatgcgaatgtcgacttgtattgggctactggcaccaatcggcagaatttcacgtgcctcaatagcgcgcagtaatttagcctgcaacattaatggcatatcacctatttcatcgagaaacagcgtgcccgtattcgccgcctgaatcaaccctgttttaccgttggcagaagcgccagtaaatgcacctttaacataaccgaacagttcgctctccagaagctgctccggaatcgcggcacagttgatagcaataaagggtttattccgtcttccgctcaacttatggattgcacgggcgacgacttctttacccgtgccgctttcaccaaccaccataacgctggatgggctgggtgcaatacggctaatgagtcgttttaattgccgcataacacggcactcgccaaccaattgttcaatatgcggttcatcaggtgcatttgctacagaaaaactggtatgcgattggtgaaacgccattaaaaataattgtcggccctgaatgttatgcaattgaccaatgattaattcacttttatcgtcccatgaaacaatatgctgcatatgtccatgggtaaaattactctcaaatgttaatggtctgaaacggataggtttcccaataatattattttgcacaacaccaagtgtttttaaggcagtctgattaacaaactgaacccgattttcatcatctacaactaatacgccctgatccatattatcgatcatggtcgcaaatattttactgatgttatctcctggcccctgatcctccagaagtttcgaaacaaaaatggtggatatatggcgaacataatcagaaaattcgcgtaaattatcactgatatgctcttgttgctcgtgggtaacggcaatcaaacttatcaccccaacacaacgatcctgtaaaatgacaggcgtacccagaaatgctttttcgcggcaattttctttactatcgcaaccttcgcaaaggggatcgaagcgagactgtgtcacaactttttcagttttcgtttccaggacgtggcggagcaggcgtgagttgccgctcaactggcgaccaagaaacttcccatacgcgcccgttccggcaacgcgacacaagttttcatcaacgatctcaacctcaagctgcaaaacgctggcaagcattctggcaaaacgctgaattgtcggttgaatttgcatcaatactgactgcgtagtagcaagctccatagctttaccttccagacttacttaaaagtcgatcattgaagacgttgatggttcacagatcatgatgatattaactcaggcgaaattggctttgataaaaacataagatttttatcattttctaatgaaattatggaagagatatcacatttctatatcaatatgagaattacggcggtgagtttatcaaactgaagagagatagcctgcccctttatcttatttctgatacttagcagcaaataaataacgcgataaaaaaagccaaacgttttcgtattttacaaacaaccagaagctggcatcaatttgtgatcaaccccacacattatccgtcaaattagtcttttgcagccgcgcggataattctggcacacttattgttagtcccaggtatagctgtgaaaacaccaatcactttggcaagtcacagtgaaataaaccactttgcctgtcattccactaccgggactttatgatgaaaactgttaatgagctgattaaggatatcaattcgctgacctccaccttcacgagaaagattttttgttaacgtgggaacagacgccagatgaactgaaacaagtactggacgttgccgcagcattaaaagcactgcgtgctgaaaacatctcaaccaaagtctttaatagtggattaggtatttccgtattccgcgacaactccacccgtacccgcttctcttatgcttccgcgcttaacctgctcggccttgcacaacaagatctcgacgaaggcaaatcacaaatcgctcacggcgaaaccgtgcgtgaaaccgccaatatgatctccttctgcgccgacgctattggtattcgcgacgatatgtatctgggcgcaggcaacgcctatatgcgtgaagttggcgctgcacttgatgacggttacaagcagggtgtactgccacagcgtccggctttagtgaacctgcaatgcgatattgaccacccgactcagtcaatggctgacctcgcgtggttacgtgaacactttggttcactggaaaacctgaaaggtaaaaaaatcgccatgacctgggcctactctccaagctatggcaaaccgctctctgtaccacaaggcatcatcggtctgatgactcgcttcggtatggatgtcaccctggcccatccggaaggctacgacctgatcccggatgtggttgaagtggcgaaaaacaatgctaaagcctccggtggtagcttccgtcaggtcaccagcatggaagaagccttcaaagacgcagacatcgtttatccgaagtcatgggcaccttacaaagtgatggaagagcgtactgaattgctgcgtgcgaacgatcacgaaggcttaaaagcactggaaaaacagtgtctggcacagaacgcgcaacacaaagactggcattgtactgaagagatgatggaactgacccgtgatggcgaagccctgtacatgcactgcctgccagctgatatcagcggcgtatcctgtaaagaaggtgaagtgactgaaggcgtattcgaaaaataccgtatcgctacctacaaagaagccagctggaagccttatatcatcgccgcgatgatctgtcccgtaaatacgccaaaccaggtgcactgctcgagcaactgctgaaagaagcgcaagaacgcgtgaaataacccctcgggccgatcagctggtcggccctctatttccagaggccaaaaggataggatatgtccgttttctcattgaagattgatatcgccgataacaaatttttcaacggcgaaacatcaccgctcttttcgcaaagccaggccaaactggcgcgccagttccaccagaaaatagctggttatcgcccaacaccgctttgtgcgctggacgatctcgcaaacctttttggtgtgaagaaaattctcgtcaaagacgaatcaaaacgattcggtctgaacgccttcaaaatgcttggcggtgcgtacgccatcgctcaattattgtgtgaaaaatatcatcttgatatcgaaacgctgtcatttgagcacctgaaaaatgccatcggcgaaaaaatgactttcgcgaccaccaccgacggcaaccacgggcgcggtgtggcgtgggcagcacagcaactcggacagaatgcggtgatttacatgccgaaaggttctgctcaggaacgcgttgacgccattctgaacctcggtgccgagtgcatcgtcacggatatgaactatgacgataccgttcgcctgaccatgcaacacgcgcagcagcacggctgggaagtggtacaggacacggcatgggaaggttacaccaaaatcccaacctggatcatgcaaggctacgcaaccctggcagatgaagccgtcgagcaaatgcgtgaaatgggcgtaaccccgacgcacgttctgctgcaagccggtgtcggagcaatggccggtggtgtgctgggttatctggtcgacgtctatagcccgcaaaatctgcacagcattattgttgaacctgacaaagctgactgtatttatcgctccggcgtcaaaggcgacatcgtcaacgttggcggtgatatggccaccatcatggcaggcctggcctgtggcgaacctaacccgctgggctgggaaatcctacgtaactgcgccacccaattcatctcctgccaggacagcgttgccgcattaggtatgcgcgtgctgggtaatccgtacggcaacgacccgcgcatcatctccggtgaatccggcgctgtcggtttgggcgttctcgcagcggttcattatcacccgcaacgtcaaagcctgatggaaaaactggcgctgaacaaagatgccgtggtgctggttatcagcactgaaggcgacaccgacgtgaagcactaccgcgaagttgtctgggaaggcaaacacgctgtagcaccttaatcaccctattggaactgctccctgcaaaacggggagtaaaaaatctggagaaaaataatggctaagaatattccattcaaactgattcttgaaaaagcaaaagattaccaggcggatatgactcgcttcctgcgcgacatggttgctattcccagtgaaagctgcgacgagaaacgcgtagtacatcgtattaaagaagagatggaaaaagtcggcttcgataaagttgaaatcgacccgatgggcaacgttctcggttatatcggccacggcccgcgtctggtggcaatggacgctcatatcgataccgtcggcattggcaacatcaaaaactgggacttcgatccgtacgaaggcatggaaactgatgaactgattggtggtcgcggtacttccgaccaggaaggtggcatggcctctatggtttatgccggtaaaatcattaaagacctcggtctggaagatgaatataccctgctggttaccggtacggtgcaggaagaagactgcgacggtctgtgctggcagtacattattgaacaatccggcattcgcccggaatttgtggtcagtaccgaaccaaccgactgccaggtataccgtggtcagcgcggtcgtatggaaattcgtattgatgttcagggtgttagctgccacggttctgcaccagaacgcggtgataacgccattttcaaaatgggtccgattcttggcgaattacaagaactctcccaacgtctgggttatgacgaattcctcggcaaaggcaccctcaccgtttctgaaatcttcttcacatccccaagccgttgcgctgtagcagacagctgcgcagtttcaatcgaccgtcgtctgacctggggcgaaacctgggaaggcgcgctggacgaaatccgcgccctgcctgcagtacagaaagctaacgcggttgtttctatgtacaactacgaccgtccgtcctggactggcctggtttacccaaccgaatgctacttcccgacctggaaagtggaagaagatcacttcaccgttaaagcactggtgaatgcctacgaagggctgtttggcaaagcgccggttgttgataagtggaccttctcaactaacggcgtatctatcatgggccgtcacggcattccggtgatcggctttggcccgggtaaagaacctgaagcgcatgcacctaacgaaaaaacctggaaatctcacctggtgacctgtgccgcgatgtacgctgcaatcccgttaagctggctggcaacagagtaattactcttcacttattcccctccggttcgccggagggtttttggagtttgctatgcgcgtattgatcaaaaacggcactgtcgttaacgcagatggacaagccaaacaggatttgctgattgaaagcgggattgttcgccagttgggcaacaatatttcgccgcagctcccgtatgaagaaattgatgccactggctgttacgttttccctggcggcgtggatgtccatacgcatttcaatattgatgtcggcatcgcgcgcagttgtgatgatttttttaccggtacccgcgcagctgcgtgtggcggtacaacaaccattattgaccatatgggatttggcccaaacggctgtcggttacgccatcaactggaggtttatcgtggttatgccgcccataaagcggtcatcgattacagctttcacggtgtgatccagcacattaatcacgcaatcctcgacgaaatcccgatgatagtcgaggaaggactgagcagttttaaactctatttaacctatcaatacaaactcaacgatgacgaggttttgcaggcattacgccgcttgcatgaatccggcgcgctgaccaccgtgcacccggaaaatgatgcggctatcgccagcaagcgggcggaatttatcgccgcagggttaaccgcgccgcgctatcatgccttgagtcgccctctggaatgcgaagcggaagccatcgcccgcatgattaacctggcacaaattgccggtaacgccccgctctatatcgtgcacctgtctaacggcttaggtctggattatctgcgtcttgcccgtgcgaatcaccagccagtctgggttgaaacctgcccacaatatctcctgttggacgaacgcagttacgatacagaagatggcatgaagttcattcttagcccaccgctgcgtaacgtacgcgagcaggacaaactgtggtgtggcatcagcgatggtgcgattgacgtggtggcaaccgatcactgcaccttctcgatggctcaacgcctgcaaatttctaaaggcgatttcagtcgctgcccaaatggcttacccggtgtggaaaaccgcatgcagttactgttttccagtggcgtgatgacgggacgtataacaccggaacgctttgttgaattaaccagcgcaatgcccgccaggttgtttggcctgtggccgcaaaaaggattattagcgcccggttccgacggcgacgtggtgattatcgacccacgtcagagccaacaaattcagcatcgccatctccacgacaacgccgactactcgccatgggagggttttacctgtcagggcgcgattgtcagaaccttatcccgtggtgaaacgattttctgtgacggcacctttacaggcaaagccgggcgaggtcgtttcctgcgacgcaaaccgtttgtccctcccgtgctctaaccactgccagggatctatacacaatcaagaatgatgagtgaggaaaaatgagtaagaaaattgttctcgccctgggcgggaatgcgctgggcgatgacctggccgggcaaatgaaagcggtaaaaattacttctcaggcaattgttgatttaattgcccagggacatgaagttatcgtcactcatggtaacgggccgcaggtgggcatgattaaccaggcctttgaagctgccgcaaaaactgaagcgcactcgccaatgctgccgatgtctgtctgtgttgcattaagccagggttatattggttacgatctacaaaacgctttaagagaagaactgctttctcggggcattaataaacctgtagcaacgctggttactcaggtcgaagtcgacgctaacgatccggcattcctcaacccgaccaagccgatcggttcgttctttaccgagcaagaagcagagcaactgacaaaacagggttacactctgaaagaagatgctggtcgcggctatcgccgtgttgttgcctcgccaaaaccggttgatatcattgaaaaagaaacggttaaagctctggtagatgcaggtcaggtggtgatcaccgttggcggtggtggtatccctgttattcgtgaaggtaaccatctgcgtggtgccagcgcggttatcgataaagactgggccagcgcccgtttagcagaaatgattgatgccgatatgctgatcattctgactgcggtagaaaaagtggccattaacttcggtaaagagaatgaacagtggctcgatcgcctgtcattaagtgatgctgaacgctttatcgaagaaggtcattttgcgaaaggttctatgctgcctaaagtggaagctgccgcctcgtttgctcgctctcgcgcaggtcgtgaagcactgattaccgtattgagcaaagcgaaagaagggattgaaggcaaaacaggaacggtgatttgtcagtaatttaaaggccgggtgggtaataccatccggccaaagattgtcaagtaagtgcgctttgttgatgccggatgcggcgcgagcgccttatccgtcctacaaaacatcgcaaattcaatagattgcaatgcacttgtaggcctgataagcgtagcgcatcaggcaatttggcgtttgtcatcagtctcaggccgggtgggtaataccatccggccattttcatttaagccacttccagcacttcttttgtcgctttcacgccctgatgcatcaacatcattaacgcctcaagtacgccgccgccaatcgcccgggctttatcagaaacgctggtgaaatcagcggtttcaccacgaggatcgatatcaccaattttaaaaccaccaaccactgccaggccgtcgttcaacaagccacgcaccatccccgtcaacggtgctttaatttcatgctcaccaatccaggcaatcacatcgccctctttcaccagatcgcctaatttcacgttggatcgcataatgcctgcagcaggagcacggatcacccgtcgggtggtatgccccataatattgccaggaacaccggtattctcctgcgcacaaccagagtaaatcacctgaccgagccagtgcccgcgatttgtttcaattaccgcatgacaatccttcccagcagtaaagcccggcccaagcgcgattgttactggtgccatatctgcccgcgttcccaaattctgtttcgccagaatagcgtccaccacgcaaagcggtttcagttcatcaagcaatgaacaggcgggatctaccatcacaggaatgaatccgcgttcggtaagtttcatcgcttccgcagagctggttgccaggcgagcagtgacgccttcgaccgtcatttcgccatcgaacacggcctgggcaaacgccacggtacaacgaatcactgtcggtttttccacttccagcatgatcactttaaaacccgcatgatacagacgtagcgccacaccactggcgatatctcccgcaccgcgaatcaccaccagctggtgtccggaaggatgagaaggtttcatcatcagcccacccggcgcgttatttttcacctgtaatatttctgccagcacgctgatggcgatctcctgcggcgtttccgcacctatgttgtaaccaacgggcgcatgtaaacgggcaatatgttcttcagccacgcctttctcacgcaattgacgcaggaaaagctgaaccttgcgacgacttgccagcaaccccaaccatgcaatgggctgttcaatgagtttgtcgagggcttcacgatcctgattattcgtggcaatcaggacaaaattatcagggcgaatatccagtgcttccactgccgcaccaaacgactcagcatggagaagcgtggttgatggtgggaatagttcaggattgaggctttcgcgataaatatcagcaacggcaatatcaaatcctaatagcgccgcactctgggctatcgcccggttgacatgccccgcgccaatcaacaccagacgtggacgcataccatggacgctgataaatactgacattgcacctccacaatctgacccgacagcatccgcaccgttacgagccatacgtccatggaataatcgcggcttacgttcctgcaatgcctgaagcgactcttcaatcaccttccgctcaaccattccgccaccaattgtaccgacgatagaaccatcggcgcgcactaacatttgtgcagaatggcggggagtcgagcctcggctatcaacaatttgcgccatagcaaacggacaattttgctcttcgagttttgcagcctctgtgaaaatattcataccaacctcaatggatatcctttcagtaacccggaatacccgggccgctaattcacaaatctgcgcgcgattgcaggatgttcttgtatatcgcccagccagattgcctctacgtcgtgttgttgcagcggttgaaggagctcgctttgtgcaatcgcattctcacattgagaaaaacggttaatgaaccagactcgccgacaaccttgcggtacgtttttaaacgccccctgagggtggcgaaccagcgcaacgagatcgctcagttgcaaggttgcatcaggtgttaacccggtaatatcagcaaactgcgaccagcgatggacattttctgtgctcactttcgcgcccaaagtatgtcctcccatcacagcaatcacgcagcaactgcttttgggtatgcaaggttcgtgctcatcaggcgcttttaacggcattccacgcgagccatctgcttcaatgagaattacgtcacactctggtcgttgcaccagtgcatcaatcgcttctggcgtaaatccctgcacttttccctggttcgctttccagctgtgaaaacaaaatgaaatgggggatgtaagagacgcatgaggaagcatggcgggatcacgacagaaaaccacgggccagtgagacgttggcataaacatatgtgtcgtcgtcgtgattaacacacgcctgccgctagcctggagcagttctgccagccaaaaaagcaagctggttttccccccagcaccaacaacagaaatcacagtgggacgtttctgcgcacctaaatcaatgactaatgccgatgggtcaactatacttttcacgagtctttatgacctctctgggataaattatccccaacttaatccatcaggaagtaacgcaattatcaggcgttattagcccctataaataatggaaccactatgtcagccatcgactgtataattaccgctgccggattatcatcaagaatggggcaatggaaaatgatgttaccctgggaacagggaacaattcttgatacaagtatcaaaaatgcgttgcagttttgtagccgaattattttagtcaccggctatcgtggtaatgaactgcacgaacgttatgcgaaccagagcaatatcactattattcacaacccagattatgcgcagggtttactaacatccgtcaaggccgcagtacccgcagtgcaaacagaacattgttttctcacccacggtgacatgccaaccctcaccatcgatatttttagaaaaatctggtcgttacgaaatgatggcgcaatactgccactccataatggcatccccggccatccgattttagtgtcaaaaccatgcctgatgcaggcaatccaacgacccaatgtcaccaatatgcgtcaggcactccttatgggagatcattattccgtcgaaatagaaaatgcagaaataattttagatattgatactccggacgactttattacagcgaaggaaaggtatactgaaatttagaaaacgtagttaaacgattgcgttcaaatatttaatccttccggcactcattatcataatgataaggaatcactgattttgagaaaagagaaaaattgataaatgggctggcaataataattttcaggagtgattttaattctcatttagcacctgtgagttcattcacaaaaagcccttaagtttcgagccgcctcacatttttttatatttcccgccaaacctggcaagagtggtgcgattgttgctctatccccctaaaccaccggatttctcaacaccggtcactcaatgatatctgtataagctaaggagagggttatgggggatattatgcgtcccattccgtttgaggaacttttgacgcgcatatttgatgaataccaacaacaacgctcaatctttggtattcccgagcaacagttttactcacctgtaaaaggtaaaactgttagcgtcttcggtgaaacctgtgccactcccgtcggccctgccgctggcccgcacacgcagctcgcgcaaaatattgtcacttcctggctgactggcggacgcttcatcgaactaaaaaccgtccaaattcttgaccgcctggagctggaaaagccctgtatcgatgccgaagacgagtgctttaacaccgaatggtctaccgagtttaccctgcttaaagcctgggatgaatacctcaaagcctggtttgccctgcaccttctcgaagcgatgttccagccttctgattccggtaaatcgttcatctttaatatgagcgtcggttacaacctcgaaggtattaagcaaccgccgatgcaacagttcatcgacaatatgatggacgcatctgaccatccgaaattcgctcaatatcgcgatacgctgaataaattactccaggatgacgcatttttagctcgccacggattgcaggaaaaacgcgaaagcttgcaagccttacccgctcgcatccccaccagtatggtgcatggcgtcaccctctccaccatgcacggctgtcctccgcatgaaatcgaagccatttgccgctacatgctggaagaaaaagggctcaacacctttgtgaaacttaacccgaccttactggggtacgcgcgtgttcgtgagatcctcgatgtctgcggtttcggttacataggcttaaaagaagagtcatttgatcacgacctcaagctgacgcaagcactggaaatgctggaacgcctgatggcactggcaaaagaaaaatcactcggctttggcgtaaaactgactaacactctcggcaccatcaacaataaaggcgcactgcctggtgaagagatgtatatgtcaggccgtgcgctgttcccgctctccatcaatgttgcagcagttctctctcgcgcctttgacggcaaactgcccatttcttattccggtggtgccagtcagctgactatccgcgatatttttgatacaggtattcgccctattactatggcaaccgacctgctgaaacctggcggctatctgcgcttaagtgcctgcatgcgcgagctggaaggctccgacgcctggggacttgaccatgttgacgtcgaacgactgaacagactggcagcagatgcgttaaccatggaatacacccagaaacactggaagccagaagagcgtattgaagtggcagaagacctgccgctgaccgactgctacgttgccccctgtgttactgcctgcgctatcaagcaagatattccggaatacatccgtctgcttggcgaacaccgctatgccgacgcgctggaactcatctaccaacgcaacgctctgcccgccattaccggtcatatttgcgatcaccagtgccaatacaactgtacccgcctggattacgacagtgcgctgaatatccgcgaactgaaaaaagtcgcgctggaaaaaggttgggatgaatataagcaacgctggcacaaaccagccggttctggttcacgccatccggttgccgtgattggtgcaggtccggcgggtctggcagcaggttacttccttgccagagcgggccatccggttacgctgtttgaacgcgaagccaatgcgggcggcgtggtgaaaaatatcattcctcagttccgtattcctgcagagttaattcagcacgatatcgattttgttgccgctcacggcgtgaaatttgagtatggctgctcacccgatttaaccattgagcagttaaaaaatcagggcttccactatgttctgattgccaccggcactgataaaaatagcggtgtgaaactggcgggcgacaaccaaaatgtctggaaatcactccccttcctgcgtgaatacaacaagggtacagcgctcaagctgggcaaacatgtggtcgttgtcggggcgggtaacaccgcaatggactgcgctcgtgcggcgttacgcgttccaggcgtagaaaaagcaacgatcgtttaccgtcgttcactacaagagatgcccgcatggcgcgaagagtatgaagaagcgttgcacgacggcgtagagttccgtttcctgaataatccggaacgtttcgatgctgatggcaccttaaccttgcgcgttatgtcgcttggcgaaccggatgagaaaggtcgtcgtcgtccggttgaaaccaatgaaacagtaacactgcttgtagacagcctgatcaccgccattggtgaacagcaggatactgaagccctgaatgcgatgggcgtgccgctggacaaaaacggctggccagacgtcgaccataatggcgaaactcgtctgactgacgtctttatgatcggcgacgtacagcgcggaccatcctccattgtcgctgctgtcggaaccgcgcgtcgggcgaccgatgccatccttagtcgggaaaatatccgttcccaccagaacgataaatactggaacaacgtcaatccagcggaaatctatcaacgtaaaggcgatatctctatcacgctggtgaacagtgacgatcgtgacgcgtttgtcgcccaggaagccgctcgctgcctcgaatgtaactacgtttgcagcaagtgtgtggatgtctgcccgaaccgcgccaacgtctccattgcggtcccaggcttccagaaccgtttccagacgctgcacctcgacgcttactgtaacgaatgcggcaactgcgctcagttctgtccgtggaacggtaaaccgtacaaagacaaaatcaccgtcttcagcctggcgcaagactttgataacagcagcaacccaggcttccttgtggaagattgccgggtacgagtacgtctgaataaccaaagctgggtgttaaacatcgacagcaaaggtcagtttaacaacgtaccaccggagctgaacgatatgtgccgcatcatcagccatgtccaccagcatcatcattatctgctgggccgcgtggaggtgtaatcatgttgattctgaagaatgtcactgcggtacagctacacccggcaaaagtgcaggaaggcgttgatatcgccatcgaaaacgatgtgattgtcgctatcggcgatgccctgacgcaacgctaccccgacgccagcttcaaagagatgcatggccggattgtgatgccagggattgtctgctcgcacaaccatttttactcggggctttcccgcggaattatggcaaacatcgccccttgcccggatttcatctcaacgctgaaaaatctctggtggcggctcgatcgcgcccttgatgaagagtcgctctattacagcggactgatttgttccctggaagcgattaagagcggatgtacatcggttatcgatcaccatgcctctccggcgtatatcggcgggtcgctctccacattgcgcgacgcatttttaaaagttggcctgcgcgcgatgacctgttttgaaactactgaccgtaacaacggcatcaaagagttgcaggaaggtgtagaagaaaacatccgtttcgcccgtttgattgatgaggcgaagaaagcgacaagcgagccgtatctggtggaagcacatatcggtgctcacgcgccgtttaccgtgccggatgccggtctggagatgctgcgtgaagccgtgaaagccacaggccgtggtttgcatattcacgctgcggaagacctttacgacgtttcctacagtcaccactggtacggcaaagacctgctggcacgactggcgcaattcgatctcatcgacagcaaaacgctggtcgctcatgggctgtacttgtcgaaagatgacatcaccctactcaatcagcgcgatgcgttcctggtgcataacgcccgttcaaacatgaacaaccatgtcggctacaaccatcaccttagcgacatccgcaatctggcgttgggaacggacggcattggttcggacatgtttgaagagatgaaatttgccttctttaaacatcgcgatgcgggtggtccgctgtggcctgacagttttgccaaagccctgactaacggtaacgaactgatgagccgcaactttggcgcgaaatttgggcttctggaagccggttacaaagctgatttaaccatttgcgattacaactcgccgacgccgctgctggcagacaatatcgccgggcatatcgctttcggtatgggctcaggcagcgttcacagcgtgatggtcaatggtgtgatggtctatgaagaccgtcagtttaacttcgattgcgattccatttatgcacaagccagaaaagccgctgccagtatgtggcgtcggatggatgcgctggcataaatgacagatgccctcttcccgcagggaagagggttaaataaggaaagaagatgattgaacaatttttcaggcccgactctgtcgaacaggcgctggaactgaagcgccgctaccaggatgaagccgtctggttcgccgggggcagcaaactcaatgctacaccaacccgtaccgataaaaagattgccatttccttacaggatctggaactggactgggttgactgggataacggtgcactgcggattggcgcaatgtctcgcttgcagccactgcgtgatgcgcgatttattcctgcagcgctgcgtgaagccctcggttttgtttactcacgccatgttcgtaatcagtcgaccattggtggtgaaatcgccgcccgccaggaagagtcggtgctgcttcccgtcctgttggcactggatgctgaactggtttttggcaacggcgaaacgctgtcaatcgaggactacctggcctgcccatgcgatcgcctgctaaccgaaattatcattaaagatccgtatcgcacctgtgcgacccgcaaaattagccgttctcaggcaggtttaaccgtcgtgacggcagccgttgcaatgacagaccacgacggtatgcgaattgcgctggatggcgtcgccagtaaagcactgcgtctgcatgatgtcgaaaaacaaaatctggaaggcaatgcacttgaacaggctgtcgccaacgccattttcccgcaggaagatttgcggggcagcgtggcctataaacgctatatcacgggagttctggtagccgacctgtatgccgactgccaacaggctggggaggaagccgtatgatcatccactttactttaaatggcgcgcctcaggagctaaccgttaatccaggcgaaaacgtgcaaaagctgttgtttaacatgggaatgcactctgtacgcaacagtgatgatggtttcgggtttgccggttctgacgcaataatctttaacggtaatatcgttaacgcgtccttgcttattgccgcacagttagagaaggcagatattcgtaccgcagaatctctgggcaaatggaacgagttaagtctggttcaacaggcaatggttgatgttggcgtggtgcagtctggttataacgatccagctgcagctctgattatcaccgatcttctcgatcgcatcgccgcacctacccgcgaagagatcgacgacgcgctttctggtttgttcagccgcgatgctggctggcagcaatactatcaggtcattgaactggcggttgcacgtaaaaataatccgcaggccaccattgatatcgctccgactttccgtgacgacctagaagtcattggtaagcattatcctaaaactgatgccgcgaaaatggtgcaggcgaaaccctgctatgttgaagaccgcgtaacggctgacgcctgcgtcattaaaatgttacgtagcccacacgctcacgcactgattactcatctggatgtcagcaaagctgaagccttaccgggcgtcgttcacgttattactcacctgaattgcccggatatctactataccccgggtggtcagagcgcaccggaaccgtcaccgcttgaccgccgtatgttcggcaagaaaatgcgtcacgtcggcgatcgtgttgctgcggtcgtcgcagaaagtgaagaaattgcgctcgaagcactgaagctcatcgacgttgaatatgaagtgcttaagccggtaatgtcgatcgacgaagcaatggcggaagatgcgcctgtcgtgcacgatgaaccggtggtgtatgttgctggtgcgccagatactctggaagacgataacagccatgcagcccagcgcggcgagcatatgatcatcaacttcccgatcggttctcgccctcgcaaaaatatcgccgccagtattcatggtcatattggcgatatggacaaaggctttgccgatgccgatgtgatcattgagcgaacctataactcaacgcaagcgcagcagtgcccgactgaaacacatatctgctttactcgtatggacggcgatcgtctggttatccacgcctccacccaggtaccatggcacttacgccgccaggtcgcgcgcctcgtgggcatgaaacagcataaagttcatgtcattaaagagcgagttggcggcggttttggttccaaacaggacatcctgctggaagaagtgtgcgcctgggcaacctgcgtgaccgggcgtccggtactgttccgctacacccgtgaagaagagtttattgctaacacctctcgtcacgtcgcgaaagtcaccgtcaaactgggagcgaaaaaagatggtcgcctgacggcagtgaagatggatttccgcgccaacactggcccttacggcaaccactcactcaccgtaccgtgtaacggaccggcgctgtcgctgccgttatatccgtgcgataacgtcgatttccaggtcaccacctactacagcaacatttgcccaaatggtgcttatcagggttatggcgcaccgaaaggtaacttcgctatcaccatggcattagcggaactggctgaacagttacagatcgaccaactggaaattatcgaacgtaaccgggtacacgaagggcaagagctgaaaattctcggtgcaatcggtgaaggtaaagcgccgacctccgttccttccgccgccagctgtgcactggaagagatcctgcgtcagggtcgcgagatgatccaatggtcgtcaccgaaaccgcaaaatggtgactggcacatcggtcgcggcgtcgccattatcatgcagaaatcgggtatcccggatatcgatcaggctaactgcatgatcaaactggaatcggacggcacctttatcgttcattctggcggtgcggatattggtactggtctggatactgtagtgacgaaactggcagcagaagtgctgcactgcccaccgcaggacgtgcatgttatctccggtgataccgatcatgcgttgtttgataaaggcgcatatgcctcgtccggtacttgcttctcgggtaacgcggcgcgtttggcagcggaaaatctacgggagaaaattctgttccacggcgcgcaaatgttgggtgagccagtggcagatgttcaactggcaacgccgggcgtcgtgcgcggcaagaaaggcgaagttagtttcggggatattgcccataaaggcgaaaccggcaccggctttggttcactggtgggaactggcagttatatcacgcctgatttcgccttcccgtatggcgcaaacttcgctgaagttgccgtcaacacgcgtacgggtgaaatccgcctggataaattctacgccttgctggactgcggtacaccggtcaatccagagttagcgttgggacaaatctacggtgccaccctgcgtgctatcggccacagtatgagcgaagagatcatttatgacgccgaaggtcacccgttaacgcgtgatttacgcagttacggcgcaccgaaaattggtgacattccgcgtgatttccgcgctgtgctggtgccgagcgacgataaagtcggcccgttcggggcgaaatcgatctcggaaatcggtgtaaatggcgcagctccggcgattgctaccgcaattcacgatgcatgcggcatctggttacgcgaatggcatttcacaccggagaaaatactcactgcgctggaaaaaatataaataataaatggccgcttcggcggcctgtttctctgtttgaacgatgactaaatagtgactgcgaaaatgagataagccgttctcaaggcgtcctgcgccccaaattcgtgggaatttattttactaattcagatgatcaaatttactttaaaaggagtgaagggatgtctgatataaaccatgcaggttctgaccttatatttgaactggaggatcgccctccctttcatcaggctctcgttggtgccattacccatctgttggcaattttcgttccgatggtaacccccgcgttaatcgtgggtgcggccttacagctttccgctgaaacaactgcctatcttgtttctatggcgatgatcgcctctggtattggtacctggttacaagtaaaccgctacggcatcgtcggttctggcctactctcaattcagtcagtcaatttttcatttgttacggtcatgattgcgctgggcagcagcatgaaaagcgacggttttcacgaagagttaatcatgtcgtcgcttctcggcgtctccttcgttggcgcatttctggttgtcggatcttcatttatcttgccctatttacgtcgggttattacgcctaccgtcagcggtattgtggtactgatgatcggcttaagcctgattaaagtcggcattatcgattttggtggaggatttgcagccaaaagcagcggtacgttcggcaattacgaacatctcggcgttggtttattggttttaattgtggtgatcggctttaactgctgtcgcagtccgttgctacgcatgggagggatcgccattgggctatgtgtcggctatatcgcatcgttatgcctgggcatggtggatttcagcagtatgcgcaatttgccgttaatcaccatcccgcatccgttcaaatacggctttagttttagcttccatcagttcctggtggttggcacgatttatctgcttagcgtgctggaagcagtcggcgatatcaccgccacggcaatggtttcccgccgccccattcagggggaagagtatcagtcccggctgaaaggcggcgtgctggcagatggtctggtttctgttatcgcctccgctgtcggttcattaccattaaccacgtttgcgcaaaataatggggttattcagatgactggcgtcgcttcacgttatgtcgggcgaaccatcgcggtaatgctggttatcctcggcttatttccgatgattggcggcttcttcacgaccattccctcggcagttctgggaggcgcaatgacgttgatgttttccatgattgccatcgcagggattcgcatcatcatcaccaacggtttaaagcgccgtgaaacacttattgtcgccacttctttaggtttagggcttggcgtctcctacgatcccgaaatttttaaaatattgccagcctctatttatgtattagttgaaaaccctatttgtgctggcgggttaactgcgattttattaaatattatcctccctggtggctaccgacaggaaaacgttctgcctggtattacctcagcggaagagatggattaacagtaaaggagtcaatgatgtcaggagaacacacgttaaaagcggtacgaggcagttttattgatgtcacccgtacgatcgataacccggaagagattgcctctgcgctgcggtttattgaggatggtttattactcattaaacagggaaaagtggaatggtttggcgaatgggaaaacggaaagcatcaaattcctgacaccattcgcgtgcgcgactatcgcggcaaactgatagtaccgggctttgtcgatacacatatccattatccgcaaagtgaaatggtgggggcctatggtgagcaattgctggagtggttgaataaacacaccttccctactgaacgtcgttatgaggatttagagtacgcccgcgaaatgtcggcgttcttcatcaagcagcttttacgtaacggaaccaccacggcgctggtgtttggcactgttcatccgcaatctgttgatgcgctgtttgaagccgccagtcatatcaatatgcgtatgattgccggtaaggtgatgatggaccgcaacgcaccggattatctgctcgacactgccgaaagcagctatcaccaaagcaaagaactgatcgaacgctggcacaaaaatggtcgtctgctatatgcgattacgccacgcttcgccccgacctcatctcctgaacagatggcgatggcgcaacgcctgaaagaagaatatccggatacgtgggtacatacccatctctgtgaaaacaaagatgaaattgcctgggtgaaatcgctttatcctgaccatgatggttatctggatgtttaccatcagtacggcctgaccggtaaaaactgtgtctttgctcactgcgtccatctcgaagaaaaagagtgggatcgtctcagcgaaaccaaatccagcattgctttctgtccgacctccaacctttacctcggcagcggcttattcaacttgaaaaaagcatggcagaagaaagttaaagtgggcatgggaacggatatcggtgccggaaccactttcaacatgctgcaaacgctgaacgaagcctacaaagtattgcaattacaaggctatcgcctctcggcatatgaagcgttttacctggccacgctcggcggagcgaaatctctgggccttgacgatttgattggcaactttttacctggcaaagaggctgatttcgtggtgatggaacccaccgccactccgctacagcagctgcgctatgacaactctgtttctttagtcgacaaattgttcgtgatgatgacgttgggcgatgaccgttcgatctaccgcacctacgttgatggtcgtctggtgtacgaacgcaactaataataaaactttaacatcctcgtgaggacatcattatgtctggagacatcctacaaacaccggacgcaccaaagccacagggcgcgctggataattattttaaaattaccgctcgtggcagtaccgttcgtcaggaagtactggctggcttaacgacctttctggccatggtttattccgttatcgtcgttccgggaatgctgggcaaagcaggttttcctcccgcagctgtgtttgttgccacctgtctggtcgcgggcttcggctcgttgctgatgggattatgggctaatttgccaatggcgattggttgcgcgatttccttgacggcgtttaccgcattcagtctggtactcgggcaacaaattagcgttcctgtcgcactgggcgcggtatttctgatgggcgtcatcttcaccgccatttccgtaaccggtgtgcgtacctggatcttacgtaatttgccgatgggtatcgctcacggtacaggtatcggtatcgggctgtttctgctgctgattgctgctaacggtgtgggtatggttatcaaaaacccgattgaaggcttgcagtggcgctcggtgcgtttacctccttcccggtgatgatgagcttgctggggctggcggtcatcttcggcctggagaagtgtcgcgtacccggcgggatcttgttggtgattattgcaatttcgatcatcggcttaatctttgacccagcggtgaaataccacggtctggtggcgatgccaagcctgactggcgaagatggtaagtctctgattttcagcctcgatattatgggtgcactccagccaactgtacttccgagtgtactggcattggtgatgaccgcagtgttcgacgctactggcaccatccgtgccgtcgccggtcaggcgaatttgttggataaagacaaccagatcatcaacggcggcaaagccctgaccagtgactcagtaagttcaatattctccggcctggtgggcgcagcgcccgcagcggtttatatcgaatcagcggcaggaaccgccgccgggggtaaaacaggtttaaccgcaaccgtagtgggggcgttattcctgttaattctgtttttatcaccgctgtcatttttgatccctggttacgccactgcacccgctctgatgtacgtaggtttgctgatgttaagtaacgtctcgaagctggatttcaatgattttattgacgctatggctggcctggtgtgtgccgtgttcatcgttctgacttgtaatatcgttaccggtattatgctgggctttgtgacactggtcgtaggccgcgtctttgcacgcgaatggcaaaagctgaatattggtacggtgatcattactgccgcactggtcgcattttacgcgggtggttgggcaatctaatagattctccgcgcctttcagcgcggagatttctttcagagaggattctcaccgctggcaacaatacgctgctggcggactcgcctgagttctctttcagtaagcaactgcagcgcctgtgttgggcaagattcaacgcaggctggcccctcttcccgctgttcacagagatcgcatttcacaatttgttgtcgggtatcccccggcaacgactgaatggtgatcattccaaacgggcacgcactgacgcaactctgacagccaatacaacgggcagaattggtctgcaccacctgctcgcccatcgtcagcgcccccacggggcaagcgccaacacaaggggcgttttcacactgatggcacatcaccggcgcactgatgctgtccagtcgctgtaccttcagccggggtaaaaagacatcggcattcaactcctgttctgaagggtgagcgaccacacaggctacttcacaagtacggcagccaatacagtcagccggattaacgataattaacgatttcatcacgatgccttcgtatcaaacagagttaacatatcgcgcgccgcctgccttcctgcggccattgcagtgacaaccagatccgcgccatgaactgcatcaccaccagcaaagacttttttcagatgcgtctgggtaggtaaatacccgacgtcaccggtttgaatcaggccccatttatcgagtttaattccgctgccctgcaaccacggcatggcatgcgcctggaaaccaaaggccataatcagaacatcggcgggcaattcaaactctgaacccgctaccggacgaggacgacggcgaccatccggccccggctcacccatggcggtacgaatcaggcccaccgcagttaaacgcccatcttcgtcacaagcgatatattgcggttgaacattgaactgaaactcgacaccttcctcgcgcgcattaaccacctctttgcgcgagcccggcatactgacttcatcacgacgatacgcgcaggtcacgctggcggcattgaggcggatggaagtccgcaaacaatccattgtcgtatcgccaccgcccaataccacgactcgcttaccttccacgtccgtcagcggatactcttcagactccggcaatcccatgagctggcgggtatgggcagtcaggaacggtagagcctgaatgacaccgggcgcatcttcatgcggcagatctgctcgcatcatcccgtaagtccccacgccgatgaaaactgcatcatattcagaagttaaatcgctaaaggtaatatcgcggccaatttcacagttaagatgaaagtcgattcccattgcggtgaatatctctcgccgctggcttaataccgttttatcgagtttgaaaggaggaatgccaaaagtcagcataccgccaatttctggatggcgatcaaagacatcgacctgaactcctgcgcgcgccagaatatcagcacaccctaaccctgcaggcccagcgccaatcaccgccactttttcgctacggggaacaactttgctgacatcgggacgccagcccatcgccagcgcggtatcggtgatgtagcgttccagattaccgatagagactgcgcccgagtgatctttcaaagtacatgcgccttcacaaagacggtcctgtggacataccctgccgcaaatttctggtaaggaactggtctggtggcaaagttctgccgcttcaataatctttccttcctgtaccagacggatgtaatccggaatagcgttatgcagcgggcaatgccagttgcagttagctttttcggcacaataaacacagcggtcactctcataagtcgcttgttgtggatccagcccgcaatatatttcgccaaagtgggttttccgttcactcgctgaaattttatctgcgcctttacgcgagttaacggggagcaacgctgcactgcgagatggctgagcgtctgatgacgcttttcctgctgccgttttgcgctggcgggccacctttatctgctgcaaccctttatcgtccatcagtcgtaacgcctgtgttgggcaaacttcaatacaggcttgcgtgccggaactgcgctggttacaaaggtcgcatttctgcgcaatcgtatcgaccatctcaacgacgccaaaggggcaagcgattgcgcatcttttacaaccaatacatttttgctcgtccagttgtacgctatcggactggaaagtcagagcattaaccggacaagccgtaacgcaaggggcattgttgcagtgatggcaggccaccggattcgcagcctggcctttccctacaacgtggatacgcggtcgaaagtcactgtgactcagcggccagttttcttgattgtgtgccaccgcacaggcaatttcacaagcatgacagcctatacattccgcagcttcagcagcaataaacttattcatttgcatccctttcatttaatgagttatgtcttctcaaatttcgcgatgcaataaacgggcatatattaggtagcatgaccgttttaattataattttgcgactgagttcaaattattgcccctcaatctatgccgctttcattatttcaacattgccgatcaaaagagcgctatccagataaaaacgattaaatgcgagagtgcgacatgccagaatgattaatgaaatatcaatatgagaaaattacagataattccattgtcaggttctcttctcattttcgtggtttaaccacgattatgtgattgcctccgcaattcctgtctctaactccccttcctcgcaaaaactggcactccacgagcatgtgtttagacagtttcattaacgtaaacggttgctttttactctggcgggcgaaaggagaaacactgatgagcgccatagattcccaacttccctcatcttctgggcaagaccgcccaactgatgaggttgaccgcatattatcaccaggaaagctgatcatactcggtctgcaacacgtccttgtcatgtacgcaggtgcagtcgctgttcctcttatgattggtgaccgactgggcctctcaaaagaagctattgcgatgctcattagctcggatctcttttgctgcgggatcgtcacattattgcaatgtatcggtatcggccgctttatggggatccgcctgccggtgattatgtcggtgacctttgctgctgtaacaccaatgatagccattgggatgaacccggatatcggcctgctggggatatttggtgccactatcgccgcgggttttatcaccacattattagcgccacttatcggtcgcttgatgcctttattcccgccactggttaccggtgtggttattacttctatcgggcttagcatcattcaggtgggtattgactgggccgccggaggtaaagggaatccgcaatatggtaatcccgtttatttaggtatctcctttgccgtcttaatttttatcttgctcattactcgctatgcgaaaggatttatgtccaacgtcgccgtattactggggattgtatttggctttttactttcgtggatgatgaatgaagtcaatttatccgggctacatgatgcttcatggtttgcgattgttacgccgatgtcgtttggtatgccgattttcgatcccgtttccattctgaccatgactgccgtgttaatcatcgtgtttatcgagtcaatggggatgttcctggcactgggtgaaatagtcggtcgtaaactctcttcgcacgatattattcgcgggctgcgtgtcgatggcgtagggacaatgataggcggcacgtttaacagcttcccccacacgtcattttctcaaaacgttggcctggttagcgtgacgcgcgttcatagccgctgggtgtgtatttcttcgggaattatattaatcctgtttggcatggtgccaaaaatggcggtgctggtagcctccattccgcaatttgtgctgggcggcgctggtctagtgatgttcggcatggtactggcgacagggattcgaattctgtcgcgctgtaactacaccaccaaccgttacaacctctatattgtggcgatcagtctcggcgttggcatgactccgacgctctctcacgatttcttttctaagttaccggccgtactgcaaccgctgctacatagcggcattatgctcgcaacccttagcgccgttgtgctgaacgtcttctttaatggctatcagcatcatgctgacctggtgaaggaatccgtctctgataaagatttaaaagtcaggacagtacgtatgtggcttctgatgcgcaagctgaagaaaaatgagcatggagaataatatgaattttttaatgcgcgctatattcagtctgttgttgctttttactctctctattcctgtcatttctgactgtgttgcaatggccattgaaagtcgcttcaaatatatgatgctacttttttaaatggtttttacctgtcggcatccgctcaaaacgggcggttgtcgataaacgctcacttggttaatcatttcactcttcaattatctataatgatgagtgatcagaattacatgtgagaaattatgcaaacggaacacgtcattttattgaatgcacagggagttcccacgggtacgctggaaaagtatgccgcacacacggcagacacccgcttacatctcgcgttctccagttggctgtttaatgccaaaggacaattattagttacccgccgcgcactgagcaaaaaagcatggcctggcgtgtggactaactcggtttgtgggcacccacaactgggagaaagcaacgaagacgcagtgatccgccgttgccgttatgagcttggcgtggaaattacgcctcctgaatctatctatcctgactttcgctaccgcgccaccgatccgagtggcattgtggaaaatgaagtgtgtccggtatttgccgcacgcaccactagtgcgttacagatcaatgatgatgaagtgatggattatcaatggtgtgatttagcagatgtattacacggtattgatgccacgccgtgggcgttcagtccgtggatggtgatgcaggcgacaaatcgcgaagccagaaaacgattatctgcatttacccagcttaaataaaaaaaccccgacatttgccggggttgtgagcataacgtaatgcttattttaccggacgcatcgccgggaacagaataacgtcgcggatggtatggctgttggtgaacagcattaccatacggtcgataccaattcccagacctgctgtcggcggtaagccatgttccagtgcggtgacgtaatcttcatcgtagaacatcgcttcgtcgtcacctgcgtctttcgcggcaacctgatccaggaagcgttgcgcctgatcttccgcgtcattcagctcgctaaagccgttaccgatttcacgaccaccaatgaagaactcaaagcggtctgtgatttccgggttaacgtcgttacgacgcgccagcggagaaacttctgccggatattcagtaatgaaggtcggctgaatcagatgtgcttctgccacttcttcgaagatctcggtaacgatacggcccagaccccagctcttctcaacgtggatgccgatagattcagcaattgctttcgcagagtcgaagttgtccagatccgccatgtcggtttccgggcgatatttcttgatcgcttcacgcatggtcagtttttcgaacggtttaccgaagtccagcgtcacgtcgccgtaggtcacttccgtcttaccgagaatatcctgtgccagagtacggaacagcgattcggtcagctcgatcagatctttgtaatctgcgtaagccatgtagagttccatcatggtgaactctgggttatgacgtacggaaataccttcgttacggaagttacggttgatttcgaatacacgctcgaagccaccaaccaccagacgcttgaggtacagttccggcgcgatacgcaggtacatgtcgagatccagcgcgttatggtgggtgataaacggacgcgcagcggcaccgccagggatcacctgcatcatcggcgtttcaacttccataaagccgcggttcaccatgaactggcgaataccagagaggatctgcgagcgcactttaaaggtgttgcgggattcatcgttggagatgagatcgagataacgctgacgatagcgcgcttcctgatcctgcaagccgtggaatttatccggcagcggacgcagtgctttggtcagcagacgcaactcggtgcagtggatagacagttcgccggttttggttttgaacagcttacctttcgcgccgaggatgtcgccgaggtcccattttttgaactgctcgttataaacgccttccgggagatcgtcacgggcaacgtacagctgaatgcgaccgccaacgtcctgcagggtaacgaaagacgctttacccataatacgacgggtcatcatgcggccagcaacggcgacttcgatgttcagcgcttccagttcttcgttctctttgccgtcgaattctgcgtgcaattggtcagaggtatgatcgcgacggaaatcgttcgggaaggcaatcccctgctcgcgcaggttcgccagcttctcacgacgcgttttcagttcattgttaagatcgactaccgcgtcagcgccctgtgcgtgttgttcagacatgttggttcctcataaccctgctttcaaacttgcttcgataaattgatccaggctgccgtccagcacggcctgcgtgttgcgggtttctaccccggtgcgcagatctttaatgcgggagtcatcaaggacataagaacgaatctggctgccccagccgatgtcggatttgttatcttccatcgcctgtttctcggcatttttcttctgcatctccagttcataaagcttcgctttcatctgcttcatggcctgatctttgttcttgtgctgggaacggtcgttctggcactgggtcacgatcccggtcgggatgtgggtaatacgcaccgcagattcggtacggttaacgtgctgaccgcccgcgccggacgtgcgataaacgtcaatgcgcagatccgccgggttgatttcgatatcaatatcatcatcaacttccggataaacaaacgcggagctgaacgacgtgtggcgacgaccgccggagtcaaacgggcttttacgcaccaggcggtgaacgccggtttctgtacgcagccagccgtaagcgtaatcgccggagattttgatcgtcacggatttaatacccgccacttcaccttccgactcttcgatgatttcagttttgaaaccacgcgattctgcccagcgcagatacatacgctcaagcatgctcgcccagtcctgtgcttccgtaccgccagaccccgcctgaatatcgaggtagcagtcggcgctgtcatattcgccagagaacatacggcggaactcaagctgcgccagtttttcttccagggcgtcgagttcagcaacggcttcgttaaaggtttcttcgtcgtcagcttctacagccagttccagcagaccagaaacatcttccagcccctgtttcatttggtcgagggtgtcgacaacggcttcgagggaggaacgctctttacccagcgcctgtgcgcgttcgggttcgttccagacatccggctgttccagctcggcgtttacttcttccagacgctctttcttggcgtcgtagtcaaagataccccctaagaacgtcggagcgttccgtgaggtcctgaatgcgattatttaccggattaatttcaaacatggtctgatttcttttattgagctagtcaaaatgcggtgataagagcgggattgtacccaatccacgctcttttttatagagaagatgacgctaaattggccagatattgtcgatgataatttgcaggctgcggttgccgcgaaactcgttgatatcgagcttataagccagttgcacttcgcgcacgccgttatccggccagagggcggtatcgacattaaaagcaataccatccagcagtggaccgccgccgaccggttcgaccatcaccttcaaatgacgttcgcccaccagccgctgttgcagcagacggaaatgaccgtcaaacagcggctccgggaacatctgcccccacgggccagcatcgcgcagcagctgcgccacttccatggtcatttcggccgggcttaacggaccgtctgataccacttcgccttgcaatagcgaagggtccagccactcagtaaccagttcgccaaaccgttgttgaaagagtttgaatttatcctcttccagcgacaaacccgccgccatcgcatgaccgccaaacttcagcatcatgccagggtagagtgtgtctaatcgctccagcgcatcacgcatatgcagcccctgaatggagcgaccggaacctttcagcgtaccgtcacctgctggcgcaaacgcgataaccggacggtgaaaacgctctttgatgcgcgaagccagaataccgacaacgccctgatgccattcggggtgatacattgccagcccgccgggtagcgtgtcacggctgcgctccagtttctcgcacagggtcagggcttcaatttgcattccttgttcgatctcttttcgcgtctggtttagcgcatcgagttcatttgccagcacgcgcgcttcgccgatgttgtcgcacaacaacagcgccacaccgacggacatatcgtccagtcgtccggcagcattgagacgtggccccagcgcaaaacctaaatcgctggcggcgagtttttgtgcatcacggtttgccacttcaagcagcgctttaatccccggacggcactttccggctcggatgcgactcatcccctgccaggtcagaatgcgattattagcgtccagcggcacgacgtccgccactgtccccagcgcgaccagatccagcagttctgccaggttaggaattgcgatgttacgctcatcaaaccagccctgatcgcgcaaaaaggtgcgcagcgccagcatcagataaaacgccacacccacgcctgccagtgatttcgacgggaaattacagtcgcgcaagttagggttaatgatcgcttccgctgcgggtaatgtgtcgcctggcaaatggtgatcggtaacaataaccgggatgcccaacgagcgagcgtgctcaacccccgcatgggaggaaataccgttatccaccgtgacaattaactgcgcgccacgggcatgggcctgatcgaccacttccgggcttaagccgtaaccgtcttcgaaacggtttggtaccaggtagtcgatattgctgcaaccaagcgagcgcatcgccagcacgcttagagccgtgctggtcgcgccgtcggcgtcgaaatcaccgaccacaataatccgcgttccttcgcgaaaagcgttgtaaaggatctcaacggccttttcgacgccgctcagttgctgccagggcagcatacctttaacactgcgttccagttcttgcgcactgcgtactccccggctggcgtataaacggcgcagcaagggaggcaattcagcgggcaagtctgccgtttcatcgacttcacggcgacgaagttgtatctgttgtttcacgcgaattatttaccgctggtcattttttggtgttcgtcgaggaattctttcatctctttcggcggctggtaacccggaacaagtgtgccattgctcagcacaactgccggagtaccgctaacgccaagctggacgccaagtgcgtaatggtcggcaatatccacgtcgcaactggctggtgcgacgcttttacctgccatcacatcatcaaacgctttgtttttatctttcgcacaccagatagctttcatttctttctctgcatcgctgtccagcccctggcgcgggaaagcaagataacgcacggtgatccccagcgcgttgtagtctgccatttgctcatgcagtttgtggcagtaaccacaggtaatatcagtaaacacggtgatgacgtgtttttcctgcggcgctttataaacgatcatctctttttcaagcgcattcaactgctttaacagcatcttattggtgacattgaccggagccgtgccactaacgtcatacattggcccctgaatgatatgtttaccatcatcggtgatgtacaacacgccgctgttagtcagaactgtcttcatgccagctacaggcgcgggctgaatatcgctgcttttgatgcccattttggctaacgtttgttgaattgccgcgtcatcagcctgagcaaagcctgaaaacgccgctaacaaagtaaacaacataaaacctttcttcataaatcttcccgttcttttcagacatcacgcccgcgggtgatgctgttgatgaagttgccgcagacgctcggtagcgacatgcgtataaatttgcgtggtggagagatcgctgtggcccagtagcatctgcaccacgcgtaaatccgcaccatgatttaataaatgagtggcaaaagcgtgacgcaacacatgcggtgacagcttttcgctgtcgatacccgccagcacagcataatgtttaatacggtgccagaaggtctgtcgcgtcatctgctgcgcacgctggctgggaaacaacacgtcaattgacacaccattcagcagccacggacgcccatgttccagataggtttccagccagtaaaccgcctcttcacctaacggcaccagacgctctttgttgcctttaccaatgacccgtaccacgccctgacgcaggctgatatcactcattgtcagtccgaccagttcagagacacgcagcccggtagcatacaacacttcaagcatggctttatcgcgtagctccagtggctgatcgattaatggtgcctgtaataaacgttcgacctgcgcttcgcttaaatcttttggcaaacgctggggcaatttcggtgaagcgagatgcgcactgggatcgtcttcacgaaacttttcgcgataaagatactggaacaatcggcgcactgcactcagcaaacgcgctgagctggtggctttatacccgccctccagccgttctgccagtaatgcctgcaaatcgtcactttgcgccgtcgccagcgtcaacccgcggtgatgcaaccactccaccatcattgacagatcgcgacggtaagcgttcaacgtattttcagccagatttttttccagccacagagcatcaagaaactgctcgatgcgtgccagatcctgtttcacttgcgccccttatggtcactcatttgatccattatgccttattgtgccgtgactaaagcgattctgatacactagccgcaaaagccacagcagaatcgagaagcttacgttatgaatatgggtcttttttacggttccagcacctgttacaccgaaatggcggcagaaaaaatccgcgatattatcggcccagaactggtgaccttacataacctcaaggacgactccccgaaattaatggagcagtacgatgtgctcattctgggtatcccgacctgggattttggtgaaatccaggaagactgggaagccgtctgggatcagctcgacgacctgaaccttgaaggtaaaattgttgcgctgtatgggcttggcgatcaactgggatacggcgagtggttcctcgatgcgctcggtatgctgcatgacaaactctcgaccaaaggcgtgaagttcgtcggctactggccaacggaaggatatgaatttaccagcccgaaaccggtgattgctgacgggcaactgttcgtgggtctggcgctggatgaaactaaccagtatgaccttagcgacgagcgtattcagagctggtgcgagcaaatcctcaacgaaatggcagagcattacgcctgatctcactgacggcttagcgcatatgctttgccgtcatctttatctttgcgtctcttgttgcaacaaaatccgccgtaaatcccgccattcagcttcgtccatgctgtcggctgccagccataaatgttgccgtttaccgccatcagaacgtaaacgcagcatcatgccgctcttaatcatccacggtgctttgacgatgctccactcctgcccttgccaacgcaaacgcccgtccatcaacaagcgaatttccccctggcgagcattaatacgccgctggctgcgaacgcaatcaaacaccaccagcgaaagtaacaccatccataacggggtgtaactgagtggccagggcatgagtaaaataacagcggcaaccagcccatgaatcagcaaggaaagccactgtgcgcgccaggagacgcgcaaatcagattgccacaggaccacgttcccggttccgtgtctggatgagtcggaccatcatttccagttctgcatcggccggtttaccgtgattcatcagccagttaaacaggtccggatcgtcacattccagcagacgaataaagatgcgtttttcgtcatcgcttaagctgtcgtactcatgttcgaaaaacggcatgattgaaatatcgagttcgcgcataccacggcggcatgcccaatgaatgcgggctttgttgttaatgtccatcttcttcctgtctcacgaaaatccagtacccggctattgtaacgtgtttttcgccttcttttacgggaatatcagtaaacaccatcgcgatcgcgaaattaattcacaacaattcaatggcttcatttttttggaagtcgcctcgcagaaggcacagatcgcgtagtgaaagcacttgcattgcctcatagctcttttaccattagtcattaatacgccgttaagcaactcaggactctattatggcttttacaccttttcctccccgtcagcctacggcttctgcccgtttaccgctgacgctgatgacgcttgatgactgggcgcttgccaccattactggcgcggacagcgaaaaatatatgcagggtcaggtgacagcagatgtcagccagatggcagaagatcagcacctgctcgccgcccattgcgacgccaaaggtaaaatgtggagcaatttacgtctgttccgcgacggcgatggctttgcatggattgaacggcgcagcgtgcgtgaaccgcagctgactgaactgaaaaaatatgcggtattctctaaagtgaccatcgcgccagacgacgagcgtgtgctgcttggtgttgccggttttcaggcgcgcgccgcgctggcaaatctctttagcgaactgccttcgaaagaaaaacaggtagtcaaagaaggcgcgaccactttgctatggtttgaacacccggcagaacgtttcctgatcgtaaccgatgaagctactgctaatatgctgaccgataaactgcgcggtgaagcggaactgaacaatagccaacagtggctggcattaaacattgaagcgggtttcccggtgattgatgccgccaacagcgggcagtttatcccacaggcgaccaatctccaggcgctgggcggtatcagctttaagaaaggctgttataccggacaagagatggtggcgcgagcaaaattccgtggtgccaataaacgtgcgctctggttgctggcaggtagcgccagccgactgccggaagctggtgaagacttagagctgaaaatgggcgagaactggcgtcgtaccggtacggtactggctgcggtaaaactggaagatggtcaggtcgtggtacaggtcgtcatgaataacgatatggaaccggatagcatcttccgcgtacgcgacgatgcgaatacattgcatatcgagccgctgccgtattcgctcgaagagtaaatctctttatcgcatcaggcatttatcgcctgatgcgacgctggcgcgtcttatcatgtctgggatttgatgcctttatcacaacagggacgaggcccgtagatcggataaggcgttcacgccgaatccggcagttgtgctccgatgcctgatgcgacgctggcgcgtcttatcaggcctacaaaggcatacccattacgcctgcccaatatacaaatagatcgccagaaagtggcacacactaccgccgagcacgaagccgtgccagatggcatggttgtatggaatgcgtttgcagacgtagaaaatcaccccgagcgaataaaccacgccgcctaccgccagtaaggtaacgctgcccgccgcgagcttaactgccatttcataaattaccaccagcgacagccagcccatcgccagataggtcaccagagataaaattttgaatcggtgcgcgatggtcagtttaaacagaatacccagcaatgccaggctccagataacaatcatcaacccgcgcgctaacggagaatccagccccaccagcaaaaacggcgtgtaggttccggcaatcaacaggtaaatagcgcaatggtcaaatttcttcagccacatttttgcccgttgatgaggaatggcgtgatagagcgtcgaagcgaggaacagcaggatcatactgccgccatagaggctgtagctggttatcgctgtggcgctggcattaagatccaccgcctgaaccagtagcaacaccagcccaacgataccaaacaccaacccaatgccgtgactgacgctgttggctatttcctctgccagtgaatatccctgcttaatgaggggcttctgaaccataacttactccggagaaacgtacacgcacatgtatacctctccagcgtaactgagaatagttccagtgaacacctgttagctaaaataaattctgatttgagactaatctcctaaaaatcatgaaattaaatgcgaaatttcaactaacaggcgtgagttcaatttaaagacatttaaattcaatcacataaaattgtgtctgaccgggatagatgtcagcaatgacttttttcagttcagtcagggtcatattttcctgctctgcatgtttttcagtcagcgtatccagcgttacggttgaggttgcggtgacttcaatcgtgcaaaaataaccgtcatcttcaaaacgtccgacacgaagcacatcacccgttttgaagtgcgattcagactcgtcgcggatggtgatggttttacgcccagccagaatgtcatcctggaaacgttgaaaaaaagtgatgtcgtttggctgcatggtactatttcctgtaagaattgactcatctggagcctatgatagtgaaaaaactcaccttaccgaaagatttcttatggggcggcgcagttgccgctcatcaggtcgaaggcggctggaacaaaggcggaaaagggccgagcatttgtgacgttctgaccggtggcgcacacggcgtgccgcgcgaaatcaccaaagaagtcttgccaggaaaatactatccaaaccatgaagccgttgatttttatggtcactataaggaagacatcaagctatttgccgaaatgggcttcaaatgttttcgtacatccattgcctggacgcgcatttttccaaaaggcgatgaagctcagccaaacgaagaagggctgaagttctacgatgatatgttcgatgaactgctgaaatacaacatcgaaccggtgatcaccctctcccactttgaaatgccgctgcatctggtgcagcaatacggtagctggaccaaccgtaaagtggttgatttctttgtacgtttcgcggaagtggtatttgaacgctataagcacaaagtcaaatactggatgaccttcaacgaaattaacaaccagcgtaactggcgtgcaccgctgttcggttactgctgctccggcgtggtgtataccgagcatgaaaacccggaagagacgatgtatcaggtgctgcatcaccagtttgtcgccagcgccctggcggtgaaagctgcgcgtcgcattaacccggagatgaaagtcggctgtatgctggcgatggtgccgctctatccttactcctgtaacccggacgatgtgatgttcgctcaggagtcgatgcgcgaacgctacgtctttaccgatgtgcagctacgcggctattacccgtcctatgtgttgaacgagtgggagcgtcgcggatttaacatcaaaatggaagacggcgatctggatgtgctgcgtgaaggcacctgcgattatcttggtttcagctattacatgaccaatgcagtgaaggccgaaggcggcaccggcgatgcgatctctggttttgaaggcagcgtaccaaacccgtatgttaaagcatctgactggggctggcagattgatccagtaggtctgcgctatgcactttgcgaactgtatgagcgttatcagaggccgctgtttattgtcgaaaacggttttggcgcttacgacaaagtggaagaagatggcagcatcaacgacgactaccgcattgactacctgcgcgcccatatcgaagagatgaaaaaagcggtgacttacgatggcgtggatctgatgggctacacaccgtggggctgcatcgactgcgtgtcgttcaccaccgggcagtacagcaaacgctacggctttatctatgtgaataaacatgacgacggtactggcgatatgtcgcgttcacgtaagaagagctttaactggtacaaagaggtgattgccagcaacggcgagaagctttaagtcgatgaagtaccggatgcaatacttgttgcatccggtcagacaacttccctgttttatttcccgcccgccaaatcgataaaacttcccgtgacgtaagaggctttatcacttagtagccagacaatggcctgcgcgacctcttctgcctgtccaccacgctgcatggggatgttcgacttaacgcgatcgacgcgtccaggctcgccgccgctggcgtgcatttcggtataaataaaccctggccgcacgcagttaacgcggatcccctgcgcggcgacttccagcgatagtccggtggttaacgtatcaatcgcccctttcgatgccgcgtaatcaacatattcccctggcgaacccaaccgtgaggccaccgaagagacattgacgatagcgccgccactgccaccatttttaagcgccatgcgttttaccgcctcgcggcagcagagaaaatatcccgtcacgttggtggaaagtactcggttgattcgctctgcggtaaggttttcaacggtgcactgggtaaacaagatcccggcgttattgaccagcgctgctagcggttcatcgtgctgatcgattgctgtaaacatcgcaacgacctggttttcgtcgctgatatccgcctggagcacgaatgctttgccaccggcttgcgttattaagttcatcacttcctgcgccgcgtggaggttttgctgataattaaccgccaccgtatacccttcttgcgccaacagtaatgcagttgcccgcccgatgccgcgactgccaccagtcacaagtgctatagccatttgtttttccgagaaaaattaattcgttgacgtatctttgagattgctaacaaactggctcaatcttcaatgttggcacgcttttccccctcgccctttcagggagagggccggggtgagggtaaatattcgcgccagtgccggcctgttcccctcaccctaaccctctccccaaaggggcgaggggactgtctgagcacttttgtactttgtcatctgactaaaaaggcgccgaagcgcctttagaaaatagtcgaatcagtgaattactggtattcgctaatcggtacgcaggagcagaacaggttacggtcgccgtaaacatcatccagacgtttcactgtcggccagtatttgtctgccacacctgccgggaataccgcaacttcacggctgtacggatgcgcccactcggcgaccagttcgctctgaatgtgcggcgcgttcaccagcgggttatcttccagcggccagacaccggctttcacctggtcaatttctgcgcggatagccagcatcgcgtcgataaagcgatccagttccactttgctttcagattcagtcggttcaaccatcagcgtacccgccaccgggaacgacatcgtcggcgcgtggaaaccgtagtcgatcaggcgcttggcaatatccagctcgctgatgccggtttcttctttcagcgggcgaatatcgagaatacattcgtgcgccacgcgaccgtcgcgaccggtatacagcaccgggaaggcatcctgcaggcggctggcaatatagttggcgttgaggattgccacctggcttgcttttttcagcccttctgcgcccatcatgcggatgtacatccagctgattggcaggatagaggcgctaccgaacggtgccgcagaaaccgcgccctgacgggttaacatgccttcgatttgcaccacgctatgacccggtacaaacggtgccaaatgcgctttcacgccgatcggtcccatacccggaccaccaccgccgtgcggaatgcagaaagttttatgtaggttaaggtgtgaaacgtccgcaccaataaagcccggcgaggtgatgccaacctgggcgttcatgttcgcgccatcaaggtaaacctgaccgccgaactgatgcacgacttcacacacttcacggatcgtttcttcatacacgccgtgggtagaaggataagtcaccatgatacaggagaggttatcgcccgcctgttccgctttcgcgcgcagatcagtcagatcgatgttgccgtttttatcacacgccacaaccaccacctgcattcctgccatatgtgcagaagcggggttagttccgtgcgcagaagccgggatcaggcagatatcgcgatgcccttcgttgcggctttcatgataatgacgaatcgccagcaggcccgcgtattcgccctgtgcgccagagttcggctgcatacaaacggcgtcgtaaccggtcagtttcaccagccagtcagccagctgcgcaatcatctgctgataaccttcggcctgctccggcgggcagaacgggtgcagttcggcaaattccggccaggtgattgggatcatctcggcggcggcgttcagtttcatggtgcaggaacccagcgggatcatcgcctgattcagcgccagatctttacgctccagcgagtgcatatagcgcatcatttcggtttcgctgtggtagcgattaaacaccggatgggtgaggatttcgtcgtcgcgcagcatcgcaggctggatagagcggctgtcgtgagccacgtctttgtccagcgtgtcgatgtccaggccgtggttatcgcccagcagcacgttgaaaagctgcattacgttttcacgcgtggttgtttcatcaagggtgatcccaaccgcgttcagaatatcgctacgcaggttgatttcagccgcttcggcacgcgtcagtacgcccgctttgtcggccacttccacacacaaggtgtcgaaatagtgcgcatggcgcagtttcagacctttttgttgcaggcccgccgccaggatatcggtcagacggtgaatgcggttagcgatacgtttcaggccaaccgggccgtgataaacggcatacaggctggcgatgtttgccagcagtacctgggaagtacaaatgttggagttcgctttctcacggcggatatgttgctcgcgagtctgcatcgccatgcgcagcgcggtattgccagctgcatctttcgatacaccgataatacggcccggcattgagcgtttgtattcatctttcgccgcaaagaatgccgcgtgtgggccaccgtagcccatcggcacgccgaagcgttgcgccgaaccaaaaacaatatccgcgccctgtttacccggcgcagttaacagcaccagcgccataatatcggcggcaacgctgaccacaattttgcgtgatttcagttcgctaataagcgcagtgtagtcgtgaatttcaccggtagtgcctacctgctgtaacagcacgccgaagacgtcctgatggtcgagcactttttgcgcgtcatcgacaatcacttcaaaaccaaaggtttcggcacgagtacggaccacatccagcgtttgcggatgcacatcggaagccacgaagaagcggttggcatttttcagtttgctgacgcgtttcgccatcgccattgcttcggcggcagcggtggcctcgtccagaagagaagcagaggccatatccagtccagtcaaatccagcgttacctgctggaagttgagcagtgcttcaaggcggccctgggagacttcaggttgatacggagtgtacgcggtataccagcccggattttccagcatgttacgcaggataaccggcggtagctgcacggcggtgtaacccatgccgatgtaagacgtgaagcgtttattgcgactggcaatagccttgagttctgccagtgcggcgtattcggtcgccggtgcgccaacctgcggtggtgtcgcaagttgaatatctttcggcacaatctggccggtcagcgcgtttaacgattgtgcaccaacggcattcagcatttcttgctgttgcgcggcgtccggtccgatatggcgttcaataaaagcgccgctgttttcaagctggcttaacgtctgtgtcatgagcgatggttcctgaaacgtgcagtgaattgtgaacctctctccttacgaagagagtgagggtgaggcataaattttcctcaccctgatcctctcccgcagaagaggaataaagccgttactcgtcttctaacaatgcttcgtatgcggtcgcatccagcagtgattccagttcgctttcatcgctggctttgattttaaagatccagccgcctgcatacggttcgctgttcaccagttccggggaatcgctcagtgcgtcgtttaccgccacgatttcaccgcttactggcgcataaatgtctgacgccgcttttaccgattcggcaaccgcgcagtcatcgcccgcgctaaccgttgcgcccacttccggcaggtcaacaaacaccatatcgcctaacagctcctgagcatgttcggtaataccaacggtgtaagtgccgtcggcttctttacgcagccattcgtgttctttgctgtatttcagttctgctggtacgttgctcatcaatcaatctccaaaaaagtaaatcacgcgacggctttgccgttacgcacaaaaacaggttttgtcactttaaccggcatttcacggttgcgaatttgcacaatcgccgtttcgccaataccttccggcacgcgcgccagcgcaatgctgtaacccagcgtcggggagaaagtaccgctggtgataatgccttcatgctggttgccctgcgcatcggtaaagcgtaccggcagttcattacgcagcacgcctttttcggtcatcaccagaccaaccagtttttctgtaccatgctcacgctgcacttccagggcttcacgaccgataaagtcacgatctgccggttcccaggcgatggtccagcccatgttggcggctaaaggagagatggtttcgtccatctcctgaccataaagattcatgcccgcttccagacgcagcgtgtcacgcgcgcccaagccacatggcttaacacccgcttccaccagcgcacgccagaaatcggccgctttttcattgggcagcgcaatttcatagcccgcttcaccggtataaccagtggtggcaataaacagatcgcccgcctgcacgccaaagaacggtttcatcccttccaccgcctgacgctgggcgtcattaaacagtgtggcagcttttgcctgcgcattcggcccttgcacggcaatcatggaaaggtcatcacgaacggtaatttcgatgccgaaaggttcagcgtgttgggtaatccaggagaggtctttttcgcgggtggcggagttaacaacgaggcggaagaaatcttcagtaaagtagtagacgatgaggtcatctatcacaccgccagaggcattcaacatccccgagtaaagggctttgccgcttttggtgagcttcgccacatcgttcgccagcagataacgcagaaactcccgggtgcggctgccgcgaagatcgacgatggtcatatgtgacacatcaaacattccggcatcggtacgtaccgcatgatgttcgtcgatttgcgaaccgtaatgcagcggcatcatccagccgtggaaatccaccatgcgagcgccgcaaagcgtgtgttgttcgtacaaaggagtctgttgtgccatcttgtcctcattgaataagcggggctgacaactttttcatggtgaaattatcaccacgaaacccagcatcggagccactcccggtccccaacgcaatcgttctcttttgcctgaacttaccaccgaaacagactgttaaccataaggtaaaattgatcatcacattagcttatggttaaaaaatgcaaaaatcgcgacagaataaaaaaccaaaaaatacaccagtttctatacaaagatgatgtgatgagaaagtcaatttgaataagacaatattaagagctaaaaaaatgtcaaaaaacactaaatcaaaaaataatggcattagaaaatataatgcgaaaacggaggtgaaattagtttatttcaaatgaggaaaatctcccggcgaaaaaaccgggagatgaaagtgtgatgggtatcaaataaacaacagaggagaaatttttaacgcagccattcaggcaaatcgtttaatcccattgcctggcggataagttgcggcttaacgccaggaagcgtgtcggccagtttcaaaccaatatcacgcagcagttttttcgccggattggtaccggaaaacagatcgcggaatccctgcataccagccagcatcaacgccgcactgtgcttgcggctacgctcatagcgacgcagataaatgtactgcccgatgtctttcccctgacgatgcaaccgtttcagttcggcaatcagctctgcagcatccataaagccgagatttaccccctgccccgccagcgggtgaatggtatgtgcggcgtcgcccaccagcgccagacggtgcgaggcaaactggcgcgcataacgccccgtcagtgggaacacctgacgcgcgctctcaaccttgcataagcccaggcgattatcaaaagcgatatttaacgcgcgattaaattcgtcttcacttgcctgctgcatccgctgcgcttcctctggcgacagtgaccagacaatcgagcaaagatgcggatcgctaagcggtaaaaaggccagaatgccttcgccatggaaaacctgccgcgccaccgcatcatgcggttcttccgtgcgaatggtcgctaccagcgcgtgatgctgataatcccagaaagtcagcggaatatcggctttgttgcgcaaccaggaattagcgccgtccgcgccaatcaccagacgcgccgttaacatgctgccatctttcagcgtcaggaaggtttcattttctccccaggcgacctgctgtaattctgcgggggctaacagagtgatatctgacgactgatgcgctttgttccacagcgcgtagtgaatcactgaattttcaacgatatgcccaagatggctatagcccatgctttgatcgtcaaacgaaatgtgaccaaagctgtctttgtcccacacttccataccgtgataacagctggccctacgagagagaatgtcctgccagacgccaagacgggtgagtaatttttcgctggcggcattgatagccgaaacgcgcagttgtggtggtgcattcgccgccagaggttcctgtacgcgctgctccagtacggcaacgcgtaagccgctcccctgtaagccacaggcaaccgccagccccaccatgccgccgccaacaatggctacatcaacactttgcattgtttattccttaaaaccgccttcaacgcgccacccaaccgagggtgcgctgcgccagcacatcgcgtgccggggtgaataattccatcgtcatcagcccgatgttgcgcccgacaaccagcggtgcccaacggttggcaaaaagatgtacaaggctgtccgtgacgccaatggttgcttcgcgatcgctctgtcgacgctgctgataacggcacaatacgccgtaatcccccatgtcttctccgcgctcctgcgcctgagtcagggtttccgcaagactcatcacatctcgcataccgaggttaaacccttgcccggcaatcgggtgcagagtttgcgccgcattgcccaccagcacggtacgatgggtaatagatctggcggcgtgggttaacgccagcggataagcactgcgtttaccagcgtgggtaattttcccaagtcgccagccaaaggccgactggagttcacggcaaaacttctcgtcactccacgacaacacctcttcgcgccgttccagtggatgacaccagaccagcgaacagcgtccgtcagacatcggcaacatcgccagcgggccatgttgcgtaaagcgttcaaaagcgcgcccttcatgcgcaacggaagtagcaacgttggcaatcacggccagttgttcgtaaggctcctgctgccagtcaacgccgcacgcggtggctaacgctgaatgggtgccatcagctgctaccagcacgcggcccgtcagcgtctcgccactctccagcgtcacttcaacgtgactctgagtacgggcaacgttagccacgcgatcagggcaatgcagcgttacgccaggtgctttacgcagcaatgcaaacagccgttgcccgacattgtgcaattcgacaacctgtcccagcgccgccagttggtaatcttctgcggcgagggtgacaaatccagcgtgaccacgatcgctgacatgcacggtggtgatggcagttgcgcaatccgccagagattgccagacgccgatgcgcgccagttgctgacaggtacccgccgccagcgctatcgctcgtccatcaaagcccggatgagcatgtgactctggcgcagtcgcttcaatcaaatgtaccggcagcgccccgtgacttaaccgggaaatagccagcgccagcgtcgcgcccgccatgccgccaccgacgatgattacgctcattgctttctcgcagcaaccatcaacgcttcgatttcttccggctttttcaccacgctggcggtgaggttttcgttaccggtttcggtaatcacaatgtcgtcttcaatacgaatgccgataccgcgatattgttctggcacttctgcatccggcgcaatatacagccctggctctacggtcagtaccatgcccggttccagaatgcgcgagcgatcctgaccataaacacccacgtcatggacatccagtcctaaccagtggctaaggccatgcataaagaaaggacgatgggcgttctgagcgatcagttcatcaacatcacctttcaggatgccgagttttaccaggccgctaaccatgatgcgcaccacttcaccagtgacttccagaatggaagttcccggacgatacaggcgcaggctggtttcgagagactccagcacaatgtcgtagatttcacgctgggcctgggtgaatttgccgttgaccgggaaggtgcgggtaatatcgccagcgtaacctttgtattcacaacccgcgtcaatcaacaccaggtcgccgtcgcgcatttcacactcgttttcggtgtagtgcagaatgcagccgttttcaccgctgccgacaatggtgttataggacggatagcgcgcaccgtggcggttaaattcgtggtgaatttcgccttccagatggtactcgaacattcccggacggcatttttccatcgcccgtgtatgtgccatggcggtgatttctcccgcgcggcggagtacggcaatctcttctggcgatttgaacaggcgcatttcatgaacaacaggacgccagtcgatcatcgttgccggtgcggtgagattttgccgcgaacctttacgcagtttttccagcgcactgttcacgattacatcagcatatgcatattcgccctgggcatggtaaaccacatccaggccgttaagtagttgataaagttgctgattgatttcgctgaatgccagtgcgcggtcaacgcccagtttctctggcgcggcatcctggcctaagcgacggccaaaccagatctccgccgtcaggtcgcgaacgcggttaaacagaacgctgtggttatgagtgtcatcgcttttaatcagcaccagcaccgcttccggttcgttaaagccggtgaagtaccagaagtcactgttctgacgataggggtattcgctgtcggcgctacgtgttacttctggtgcagcaaaaatcagcgcggcgctgccgggttgcatttgctccaccagggcctgacggcgacgctgaaactcttgccgggatatctcactcataacactctccttacgttttttgtttttagtgtagagtcggtttttgtacttctggcgcggtcggttgcggatgagtaaaggtgtcgtggcataacagcgcggcaacacgaacgtattcgatgatctcttcaagcgacatttcaagctcttcctgatcttcgtcttcgtcgtaacccagttgcgcaatgttacgcagatcgtcgatagcttcaccggtttcgccggtcactttatccagcttcggttgcgtaacgccaagaccaagcaggaagtgattgacccaacctgccaatgcatcagcccgatcgaaaacgctgacatcatcgccatcaggcagataaagctgaaaaaggaagccgtcatcctgcagggcatcgctggtggcagagtgcattttacgcagtgcctgtgccagctcatgaccgaaagccatgccttcgttcgtcaggtcgtgaagtagcggtagccatgagctgtcatcgttaccgccacatatcatcccgctgattaaaccatgcatctcagctggggtcagacccgtcccttgttggttcagatactggttcatttcgttgtaaccaggcatttcgttctgtatagacataagcattcgtcgtcaaagggaggaatattcatgatatgctaccactttgggccctggtggaccagaaaagggcttgtctcttctcatcagggtagctatagtgtcgccccttcgcagaccatgggtctaaagacgaaggcagcgcagtcaatcagcaggaaggtggcatgtctgcacaacccgtcgatatccaaatttttggccgttcactgcgtgtgaactgcccgcctgaccaaagggatgcgttgaatcaggcagcggacgatctgaaccaacggttgcaagatctgaaagaacgcactagagtcacaaatactgaacagttggtcttcattgccgcattgaatatcagctatgagttagcgcaagaaaaagcaaagactcgtgactacgcggcaagtatggaacagcgtattcggatgctgcagcagaccatagaacaagcgttacttgaacaaggtcgcatcaccgaaaaaactaaccaaaactttgaatgacacttttcggtttactgtggtagagtaaccgtgaagacaaaatttctctgagatgttcgcaagcgggccagtcccctgagccgatatttcataccacaagaatgtggcgctccgcggttggtgagcatgctcggtccgtccgagaagccttaaaactgcgacgacacattcaccttgaaccaagggttcaagggttacagcctgcggcggcatctcggagattcccttcttatctggcaccagccatgacgcaactaccagaactcccactgacattatcccgacaagaaatccgcaaaatgattcggcaacgtcgtcgtgcgttaacgccggaacaacagcaggaaatgggtcaacaagccgctacccggatgatgacttatcccccggtggtgatggcacatacggtcgctgtattcctctcttttgatggcgaactcgacacccagccactcatagaacaactctggcgcgccggtaagcgcgtatatcttccagttttgcatccctttagtgccggtaatttgctgttcctgaattaccatccgcaaagcgaactggtgatgaacaggttgaagatccatgagccaaaattggatgtgcgtgacgtgctacccctttcccgattagacgtgctgatcacaccgctggtcgcctttgatgagtacggtcagcgcctgggaatgggcggtggtttttatgatcggaccttacaaaactggcagcactataaaacgcaaccggtgggttatgcgcatgattgtcagttggtggaaaaactccccgttgaagagtgggatatccctcttcctgcggtggttacaccgtcgaaagtctgggagtggtaagggcgatacacccgcatcgccctgattgacatcgttgattctttgacctaatttagtgagtaagggtaagggaggattgctcctcccctgagactgactgttaataagcgctgaaacttatgagtaacagtacaatcagtatgatgacaagtcgcatcataacccttctccttcaagccctcgcttcggtgagggctttaccgttacagccccatgctgccctgccatcgtaaatccccattaaataaacacaacgcattgatctgactttgatttattttctggagcagactcgcaaagtagaatgcgcaacgcggcaacggtgtggagaagggataaaaaaacgggcaagtcagtgacctgcccgttgattttcagagaaggggaattagtacagcagacgggcgcgaatggtacccggaatagctttcattgcctgcagcgctttttcggcaacgtcttcgtcggcttcaatatcaataaccacataacccatctgggcggaagtttgcagatattgcgcggcgatgttgacgccctgctcggcgaagattttgttcagcgcagttagcacgcccggacggttttcgtggatgtgcatcagacgacgcccaccgtgcagtggcagcgagacttccgggaagttcaccgcagagagcgttgagccattgtcagaatacttgatcaatttacccgcaacttccaggccgatattctcctgcgcttcctgagtcgaaccgccaatgtgtggcgtcagaaggacgttgtcgaattcacacagcggagaggtaaatggatcgctattggtcgccggttccgtcgggaatacgtcgattgccgcccccgccagatgtttgctcgccagcgcatcacacagcgccggaatatccaccacagtaccgcgcgaagcattaatcagcagcgagccgggcttcattagtgaaatttctttcgcgcccatcatatttttggtggacggattctctggtacatgcagactcaccacatcgctcatattcagcaggtcagaaagatgctgtacctgagtggcgttgcccagcggcagtttattttcaatatcataaaagtaaacatacattcccagcgattcagccagaatgcccaattgcgtaccaatatgaccgtagccgatgatacccagctttttgccgcgcgcttcaaaagaacccgccgccagtttgttccacacgccacggtgcgctttagcattggcttccggcacgccgcgcaatagcagcagcagttcgccaatcaccagctccgcaacagagcgcgtatttgagaacggtgcgttaaataccgggatcccgcgctttgccgccgcatccagatcaacctggtttgttccgatacagaaacagccaatagcgaccagtttttctgcggcgttgatcacgtcttcagtcagatgggtacgggatcgcaggccgatgaagtgggcatcgcggatggattcttttaattgttcatcatccagcgcgcctttgtgaaattcgatgttggtgtaaccagctgcacgaaggctttccagcgccttttggtgcacgccttctaccagcagaaacttaatcttgtctttctccagcgatacctttgccatttacccaatcctgtcttttgaaatgttgtgtgcggatttgcatccgcctttcaacatatcaaaaaataatattgcggcaatatgaacgtttgcgtcgcgatgttgaggaaatatcacgcaaaggtaattcttggatgaatatgctggtttagaggatttatttagagcaatcgacaattgcctggtaaaagcgtgacacatgtcaccaaatttaatgaagagaatttttttaacgggggaggttcccccgtcagatcatttcacaatggttttgacaccgtcaggtgtgccaatcagcgcaacgtccgcgccacggttagcaaacaagccaacagtcaccacgccaggaatcgcatttatggcgttttccatcgctatcgggtcaaggatttccatgccgtggacgtcgaggatcacgttgccattatcggtcaccacgccctgacggtattccggacgaccgcccagtttcaccagctgacgcgccactgcactacgtgccatcgggataacttctactggcagcgggaatttacccagaatatcaacctgcttggaagcgtctgcaatacagataaatttttctgcaaccgaagcaatgattttttcacgggtcagcgccgcgccgccgcctttgatcatttgcatgtggccgttgatttcatctgcgccatcaacgtagatgccaaggctgtcgacttcgttgagatcaaaaacgtgaatgccgaggcttttcagtttttcagtggaagcatctgaactggaaacggccccttcaatctggcctttcattgtaccgagcgcgtcaataaagtgtgcggcggtggaacctgtacctacaccaacaatggtgccgggctgaacatactgaagtgccgcccatcctactgcttttttcaattcatcctgcgtcatgatcgtttcgcctgtggtatgaaatttcacacgcattatatacaaaaaaagcgattcagaccccgttggcaagccgcgtggttaactcatccataaaatatcgcgcaatggcaggcatcccctttcgccccgcaaataaagcatacaacggtctgggtatgccgctccacggtgcaaacaggcgcaccagttcaccgttcgcaagcccctgtttacaggcaaattgaggcaataacgccacgccattcaacacaaccagggcgcgaactcgctgagcgaaatgcattagcgcaaatccctgatcttttaagctgcgcttttaaccacggatacaaatgttacccgccgacggcttcggtatatgcaacctgacacaaaattgtgtcatagtgcaggaaaaagcatttaccaggagcagacaacagcaatgaaacgcccggactacagaacattacaggcactggatgcggtgatacgtgaacgaggatttgagcgcgcggcacaaaagctgtgcattacacaatcagccgtctcacagcgcattaagcaactggaaaatatgttcgggcagccgctgttggtgcgtaccgtaccgccgcgcccgacggaacaagggcaaaaactgctggcactgctgcgccaggtggagttgctggaagaagagtggctgggcgatgaacaaaccggttcgactccgctgctgctttcactggcggtcaacgccgacagtctggcgacgtggttgcttcctgcactggctcctgtgttggctgattcgcctatccgcctcaacttgcaggtagaagatgaaacccgcactcaggaacgtctgcgccgcggcgaagtggtcggcgcggtgagtattcaacatcaggcgctgccgagttgtcttgtcgataaacttggtgcgctcgactatctgttcgtcagctcaaaaccctttgccgaaaaatatttccctaacggcgtaacgcgttcggcattactgaaagcgccagtggtcgcgtttgaccatcttgacgatatgcaccaggcctttttgcagcaaaacttcgatctgcctccaggcagcgtgccctgccatatcgttaattcttcagaagcgttcgtacaacttgctcgccagggcaccacctgctgtatgatcccgcacctgcaaatcgagaaagagctggccagcggtgaactgattgacttaacgcctgggctatttcaacgacggatgctctactggcaccgctttgctcctgaaagccgcatgatgcgtaaagtcactgatgcgttactcgattatggtcacaaagtccttcgtcaggattaatccatcaaataatgcctgatagcacatatcaggcgttgtcctcacttctttttgtattccttgaatcacatcacaaaatagacaaatctcaggcggcaaaaaacgacgtctgaatgcattttttttgctggcgacaaacccacgtaaaaagctcaccgtaggcgcaaataccctcattttgattgcgttttacggagcaaataatgtctaacgtgcaggagtggcaacagcttgccaacaaggaattgagccgtcgggagaaaactgtcgactcgctggttcatcaaaccgcggaagggatcgccatcaagccgctgtataccgaagccgatctcgataatctggaggtgacaggtacccttcctggtttgccgccctacgttcgtggcccgcgtgccactatgtataccgcccaaccgtggaccatccgtcagtatgctggtttttcaacagcaaaagagtccaacgctttttatcgccgtaacctggccgccgggcaaaaaggtctttccgttgcgtttgaccttgccacccaccgtggctacgactccgataacccgcgcgtggcgggcgacgtcggcaaagcgggcgtcgctatcgacaccgtggaagatatgaaagtcctgttcgaccagatcccgctggataaaatgtcggtttcgatgaccatgaatggcgcagtgctaccagtactggcgttttatatcgtcgccgcagaagagcaaggtgttacacctgataaactgaccggcaccattcaaaacgatattctcaaagagtacctctgccgcaacacctatatttacccaccaaaaccgtcaatgcgcattatcgccgacatcatcgcctggtgttccggcaacatgccgcgatttaataccatcagtatcagcggttaccacatgggtgaagcgggtgccaactgcgtgcagcaggtagcatttacgctcgctgatgggattgagtacatcaaagcagcaatctctgccggactgaaaattgatgacttcgctcctcgcctgtcgttcttcttcggcatcggcatggatctgtttatgaacgtcgccatgttgcgtgcggcacgttatttatggagcgaagcggtcagtggatttggcgcacaggacccgaaatcactggcgctgcgtacccactgccagacctcaggctggagcctgactgaacaggatccgtataacaacgttatccgcaccaccattgaagcgctggctgcgacgctgggcggtactcagtcactgcataccaacgcctttgacgaagcgcttggtttgcctaccgatttctcagcacgcattgcccgcaacacccagatcatcatccaggaagaatcagaactctgccgcaccgtcgatccactggccggatcctattacattgagtcgctgaccgatcaaatcgtcaaacaagccagagctattatccaacagatcgacgaagccggtggcatggcgaaagcgatcgaagcaggtctgccaaaacgaatgatcgaagaggcctcagcgcgcgaacagtcgctgatcgaccagggcaagcgtgtcatcgttggtgtcaacaagtacaaactggatcacgaagacgaaaccgatgtacttgagatcgacaacgtgatggtgcgtaacgagcaaattgcttcgctggaacgcattcgcgccacccgtgatgatgccgccgtaaccgccgcgttgaacgccctgactcacgccgcacagcataacgaaaacctgctggctgccgctgttaatgccgctcgcgttcgcgccaccctgggtgaaatttccgatgcgctggaagtcgctttcgaccgttatctggtgccaagccagtgtgttaccggcgtgattgcgcaaagctatcatcagtctgagaaatcggcctccgagttcgatgccattgttgcgcaaacggagcagttccttgccgacaatggtcgtcgcccgcgcattctgatcgctaagatgggccaggatggacacgatcgcggcgcgaaagtgatcgccagcgcctattccgatctcggtttcgacgtagatttaagcccgatgttctctacacctgaagagatcgcccgcctggccgtagaaaacgacgttcacgtagtgggcgcatcctcactggctgccggtcataaaacgctgatcccggaactggtcgaagcgctgaaaaaatggggacgcgaagatatctgcgtggtcgcgggtggcgtcattccgccgcaggattacgccttcctgcaagagcgcggcgtggcggcgatttatggtccaggtacacctatgctcgacagtgtgcgcgacgtactgaatctgataagccagcatcatgattaatgaagccacgctggcagaaagtattcgccgcttacgtcagggtgagcgtgccacactcgcccaggccatgacgctggtggaaagccgtcacccgcgtcatcaggcactaagtacgcagctgcttgatgccattatgccgtactgcggtaacaccctgcgactgggcgttaccggcacccccggcgcggggaaaagtacctttcttgaggcctttggcatgttgttgattcgagagggattaaaggtcgcggttattgcggtcgatcccagcagcccggtcactggcggtagcattctcggggataaaacccgcatgaatgacctggcgcgtgccgaagcggcgtttattcgcccggtaccatcctccggtcatctgggcggtgccagtcagcgagcgcgggaattaatgctgttatgcgaagcagcgggttatgacgtagtgattgtcgaaacggttggcgtcgggcagtcggaaacagaagtcgcccgcatggtggactgttttatctcgttgcaaattgccggtggcggcgatgatctgcagggcattaaaaaagggctgatggaagtggctgatctgatcgttatcaacaaagacgatggcgataaccataccaatgtcgccattgcccggcatatgtacgagagtgccctgcatattctgcgacgtaaatacgacgaatggcagccacgggttctgacttgtagcgcactggaaaaacgtggaatcgatgagatctggcacgccatcatcgacttcaaaaccgcgctaactgccagtggtcgtttacaacaagtgcggcaacaacaatcggtggaatggctgcgtaagcagaccgaagaagaagtactgaatcacctgttcgcgaatgaagatttcgatcgctattaccgccagacgcttttagcggtcaaaaacaatacgctctcaccgcgcaccggcctgcggcagctcagtgaatttatccagacgcaatattttgattaaaggaatttttatgtcttatcagtatgttaacgttgtcactatcaacaaagtggcggtcattgagtttaactatggccgaaaacttaatgccttaagtaaagtctttattgatgatcttatgcaggcgttaagcgatctcaaccggccggaaattcgctgtatcattttgcgcgcaccgagtggatccaaagtcttctccgcaggtcacgatattcacgaactgccgtctggcggtcgcgatccgctctcctatgatgatccattgcgtcaaatcacccgcatgatccaaaaattcccgaaaccgatcatttcgatggtggaaggtagtgtttggggtggcgcatttgaaatgatcatgagttccgatctgatcatcgccgccagtacctcaaccttctcaatgacgcctgtaaacctcggcgtcccgtataacctggtcggcattcacaacctgacccgcgacgcgggcttccacattgtcaaagagctgatttttaccgcttcgccaatcaccgcccagcgcgcgctggctgtcggcatcctcaaccatgttgtggaagtggaagaactggaagatttcaccttacaaatggcgcaccacatctctgagaaagcgccgttagccattgccgttatcaaagaagagctgcgtgtactgggcgaagcacacaccatgaactccgatgaatttgaacgtattcaggggatgcgccgcgcggtgtatgacagcgaagattaccaggaagggatgaacgctttcctcgaaaaacgtaaacctaatttcgttggtcattaatccctgcgaacgaaggagtaaaaatggaaactcagtggacaaggatgaccgccaatgaagcggcagaaattatccagcataacgacatggtggcatttagcggctttaccccggcgggttcgccgaaagccctacccaccgcgattgcccgcagagctaacgaacagcatgaggccaaaaagccgtatcaaattcgccttctgacgggtgcgtcaatcagcgccgccgctgacgatgtactttctgacgccgatgctgtttcctggcgtgcgccatatcaaacatcgtccggtttacgtaaaaagatcaatcagggcgcggtgagtttcgttgacctgcatttgagcgaagtggcgcaaatggtcaattacggtttcttcggcgacattgatgttgccgtcattgaagcatcggcactggcaccggatggtcgagtctggttaaccagcgggatcggtaatgcgccgacctggctgctgcgggcgaagaaagtgatcattgaactcaatcactatcacgatccgcgcgttgcagaactggcggatattgtgattcctggcgcgccaccgcggcgcaatagcgtgtcgatcttccatgcaatggatcgcgtcggtacccgctatgtgcaaatcgatccgaaaaagattgtcgccgtcgtggaaaccaacttgcccgacgccggtaatatgctggataagcaaaatcccatgtgccagcagattgccgataacgtggtcacgttcttattgcaggaaatggcgcatgggcgtattccgccggaatttctgccgctgcaaagtggcgtgggcaatatcaataatgcggtaatggcgcgtctgggggaaaacccggtaattcctccgtttatgatgtattcggaagtgctacaggaatcggtggtgcatttactggaaaccggcaaaatcagcggggccagcgcctccagcctgacaatctcggccgattccctgcgcaagatttacgacaatatggattactttgccagccgcattgtgttgcgtccgcaggagatttccaataacccggaaatcatccgtcgtctgggcgtcatcgctctgaacgtcggcctggagtttgatatttacgggcatgccaactcaacacacgtagccggggtcgatctgatgaacggcatcggcggcagcggtgattttgaacgcaacgcgtatctgtcgatctttatggccccgtcgattgctaaagaaggcaagatctcaaccgtcgtgccaatgtgcagccatgttgatcacagcgaacacagcgtcaaagtgatcatcaccgaacaagggatcgccgatctgcgcggtctttccccgcttcaacgcgcccgcactatcattgataattgtgcacatcctatgtatcgggattatctgcatcgctatctggaaaatgcgcctggcggacatattcaccacgatcttagccacgtcttcgacttacaccgtaatttaattgcaaccggctcgatgctgggttaatgactcgtcccgtcacgatcttcagcaatatgctgaagcatcgtggcggtataacgatgatttctgattgaataaagatattcctgcatatacatcggcctgtgcggtgcatcaaaatatttcagcgttgccggattcaccagtcgccaggcaaaatgcgggatcaccgtcagaaaatgtccgcgctccacggcgctgattttggccataaaactgtagggacgataaataatggttggattgatcccacaaggtcgcatattcgcatcaatcattgcttcgaagttggcccggttctgaaagcgcatttgtagccagggcagctcctgaagcagctcttgctcttgtcgctcttcataacggcgagaaacgagaaagcctaatcgcagcggtggtagttcactgatagtcaggttttccagttcctgaactcgtgcagatacatgctgtggggagataataaaatctaactggcggtcaaaaagattatcgataacgccattttcgctgaactcaactggctgggcggtcacgccttcatacttatctccgagactaatcaactgatcgaaaataattgtcggataagtattatctatgccaatcacaatttctcgtgaacgacgccctgagttatggatttcattatcaatcgcagaaagccgttgataaaccgggaacagtttttgatacagttcctgtccggctttattgaggctgatattattatctttgcgggtaaatagcgtatagccaatttgttcttccagcgcggcaatgcttttaccaaatggcgaagccgtcatatggattttttctgccgcccgggcaatattattggtttgcgctaataaaatgaaattgcgcatctttttcgaaataaaaatgtccatccccctcccccgcatccttgtccgcttaaccgtttcagtcagcctatccttgatgaaaccgcgagcaaagataggtgattacgtcatggttttacagaaaattacagaaaaaggaggcaatatcgggtaaaggcattagcccgacgaatacgtcgggctacaaatattattgtgctgcaggtgttttagcgggttgttgatccacaggttctaactggaagaccacatcgacctgatcatcaaactgaatagcggcctgctcgtaagtttcctgggcggacaccggcgcggcatcggctttcatcatccgcaccattgggctgggctgatagttggaaacatggtagcgcacgctatataccggccccagtttacgatgaaagccgttcgccagttcctgcgcctgatgaatcgcgttatcaatcgctgccttacgcgctttgtctttataggcatccggctgcgccacgcccagcgacacagaacgaatttcgttaagacccgccttcagcgcgccatccagcaaggaattcagtttgtctaactgacggagcgtgacttccaccgttctcacagcgcggtagcctttaaggatacttttaccatcctgataatcataatctggctgggtgcgtaagttcgctgagctgatatcttttttcgcgatctgattgagttcaaggaaggaaatgtattgtgcgacgcgctcatctgcctgtttcttggcagtagcggcatccttcgcggccacgttaacttcaatcgcaagagtggcaatgtctggcaccgcatccacgcttgccgtaccggaggtgacaatatgcggtccatccggcaattcgttagcctgcgctgccatcccgctaatacccattaatgccgccagggcgataactttgaacttcacgttagtctctccgtgttaattgacttgcccaaaattcaggacctctggaggcaagcttagcgcctctgttttatttttccatcagatagcgcctaactgaacaaggcttgtgcatgagcaataccgtctctcgccagctgcaaggcaataaaccacataacacatcccacaaccagattgataatgcgctgtgcttttgccgtgcgcagacgcggtgccagccaggctgcgagaagagccagaccaaagaaccacaggaaagaggcgctaattgtcccgagtgcaaaccagcgttttggttccacatcaagttgcccgccaaggctgcccagtacaacaaaagtatccaggtaaacatgcggattcagccaggtcactgccaacatggtggcgataattttccatctgccttgcttcatgacttcggcgctggctaactcaatattactgctcattgctgttttaaaagcgccaaaaccataccacagcaagaaggctacgccgccccaggtgaccagcgccagcaaccacggcgactgcatcaataacgcgctgccaccaaaaatcccggcgcaaatcaggaccaaatcgctgatagcacaaagtaaggcaatcataatgtggtactgacgacgtatgccctgattcatcacaaaagcattttgtggaccgagcggtaggatcatagccgccccaagtgcaagaccttgaaagtaataagaaaacacgttggatattccgaattaagtatctgatgcagagactatatcgcgggattgttattagcggaaattgataatattaattggcaatcagaaaaactaataagagagaggccagagagtattatctggcctcagcgttgattacgcagctttgtcttctttcacccgcttaaagttcacatccatttgcgggtacgggaagctgataccggcggcatcaaattcacgtttaatacgctccagcacatcccagtacacgttttgcagatcgccgctgttgctccagacgcggaccacgaaattaatcgacgatgcaccaagttcgttcaggcgcacagtcatttcgcgatctttcaaaatgcgatcttcagactggataatattggtcaggatctgcttaacctgatcgatatcggaatcatacgccacgccaataataaattcgttacggcgaactggctcgcgggagaagttaataatatttccggcaataattttaccgttcggaataacgataattttaccgtctgcagtacgcatggtggtggagaaaatctgcacactcagcacagtaccggctacgccgcccaggtcaacatattctccggcacggaacgggcggaacatgacaagtaacacgccagcggccaggttagacagtgacccctgcaaagccagaccaacagctaagcctgcggcaccgagtacagcaatgactgacgcggtttgtacacccacgcgtcccagtgcagcgattagcgtaaaggcgataataccgtaacggactaatgcagaaagaaaatcagcaacagtggcatcgattttacgggagatcatcaggcgattcaccgcgttggaaatcatccgcgcgataatcaaaccaacgatgatgatcgcgagtgccgccacgatgtttactgcataacttagcagcagcgcctggttagctaccagccagcttcccgcgccgtttatgctatcgacaacattcaaatcttccattcaatattccttttcaactgactcaaaatggagaaatacactccgccgccttatgacgggcagtctgacaagggtaaacaataaagcataattttgccaaatagatcacagatttctcatctgaatcaccttgcttttggcgaaaaaatccccgcagagcggggctcagacagatatcaatgtgcgctttgtcatgccggatgcggcgtgaacgccttatccggcctacaaaaacctgcaaattcaatatattgcaggatacgtgtaggcctgataagcgtagcgcatcaggcaattttgcttttggcgaaaaaaagacccgcagagcgggccttgagataagcagaaaggaatatcttacagaacgtcgatcgcgttcagttcctggaatgctttctccagacgagcgatcatcgaagtctgaccggcacgcagccatacgcgcggatcgtagtatttcttgttcggctgatcttcgcctttcgggttacccagctgaccctgcagataagcttcgttcgctttgtagtagttcagaacgccttcccaggttgcccattgggtatcggtatcgatgttcatttttactacgccgtagcttacggagtctttgatttcctgagcagtagaaccggaaccaccgtggaatacgaagttcaggctgttgtgcggcaggttgtgtttcttggaaacatattcctgagaatcacgcaggatggtcggagtcagaaccacgttacccggcttgtaaacaccgtgtacgttaccgaaggacgctgcgatggtgaaacgcgggctgattttgctcagttcggtgtatgcgtaatcaacgtcttccggctgggtgtacagtgcagaagcgtccatgtggctgttgtccacgccgtcttcttcaccaccggtgcaacccagttcgatttccagagtcatgccgattttggacatgcgctccaggtatttagagcagatttcgatgttctcttgcagagattcttcagacaggtcgatcatgtgagaagagaacagcggcttaccggtagctgcgaagtgtttttcacccgcgtccaacagaccgtcgatccacggcagcagtttcttcgcgcagtggtcagtgtgcaggataaccggaacaccataatgttcagccatctggtgaacgtgatgcgcaccagagatcgcgcccaggatagcagcaccctgcggaacgtcagatttcacgcctttaccagcgataaaggaagcaccaccgttggagaactgaacgataaccggcgctttaactttagcagcggtttccagtacggcgttgatggagtcagtaccgacgcagtttactgctggcagtgcgaagttgttttcttttgctacctggaaaactttctgtacgtcatcaccagtgattacgccaggttttacgaaatcaaaaatcttagacatgtctcttgtcctgtatcgtcgggccttatactcgtcatacttcaagttgcatgtgctgcgtctgcgttcgctcaccccagtcacttacttatgtaagctcctggggattcactctcttgtcgccttcctgcaactcgaattatttagagtatgaaaaattgcgtgctctaaaagcgcgctgaaacaagggcaggtttccctgccctgtgattttttacttcttagcgcgctcttcgagcatcgctactgcaggcagtactttaccttccacgaattcgaggaatgcgccgccgccagtggagatgtaggagattttgtcagcaatgccgaacaggtcgattgctgccagagtgtcgccgccgccagcgatggagaacgcttcgctgtctgcgatagcgttagccacgatttcagtacctttgcggaagttcgggaattcgaacacgccaaccggaccgttccacagaatggttttcgcattcttcaggatttcagccagttcctgagcggaagcatcaccgatatccaggatctgctcgtcagctttcacatcgttaacagatttcagggtagccggtgcagtttcagagaactcggttgctacgcgaacatcagacggaaccgggatgttgcaggtggtcagcagacgtttagcttcgtcaaccaggtcagcttcgtacagggatttacccacatcgtggccttgtgccgcgataaaggtgttagcgataccaccaccaacaatcagctggtcagcgattttagacagggagtccagaacggtcagtttggtagatactttagaaccaccaacgatagccaccatcgggcgagcaggttctttcagtgctttacccagcgcgtccagttcagctgccagcagcgggcctgcgcacgcaacgtcagcgaatttaccgataccgtgagtagaagcctgcgcgcggtgagcagtaccgaatgcgtccattacgaacacgtcacacagtgcagcgtattttttggacagggtttcgtcgtctttcttctcgcctttgttgaagcgaacgttttccagaacaaccagttcaccttcagcaacgtcaacgccgtcgaggtaatctttaaccagacgaaccgggttagacagtttgtctttcaggtagttaacaaccggcagcagagagaattcttcgttgtactcgccttcggtaggacgacccaggtgggaagttaccatcacttttgcgccttgtttcagggccagttcgatggtcggcagagaagcacggatacgcgcgtcgctggttactttcccgtcttttactggtacgttcagatccgcacggataaatacacgtttcccagcaagatccagatcggtcatcttaattacagacatggtgaatcctctcgttgattctaaaagttttgcagacgctgcttgcgtcttacctgaaagcaacagtagccatagctaacgtcgtgtcgagcattcggttagcaaagccccattcgttatcgcaccagaccaacgttttgatcaggtgtgcgccactgacccgggtttgggtgccatcgacaatggcactgtgcggatcgtggttaaaatctacagagaccaacggcaattccgtatagtcaactataccatgaaatgcaccttgtgctgctttttgcagcaacaggttgacttcattggcttttacaggtttcttcaccgtcacgcttaaatcgattgccgtcacatttatggttggcacacgtaccgcaatcgcttcaaagcgatcgttaaattgcggaaaaaatcgtgtgataccggcggccagtttagtatcgaccggaatgatcgactggctggctgcccgggtgcgacgcaggtcaggatggtatgcatcaataacctgttgatcgtgcatggcggagtgaattgtggtcacagtgccggactcaataccgtacgcatcatctaacaatttgatgacgggaattatgcaattcgtggtacaggaagcgttagaaacgatgcggtgttccgcacgaagttgatcctgattgacgccgtaaacaacggtcgcgtcgagatcgttactgccaggatgtgaaaagagcacttttttggccccggcggcaatatgcgcttcgccatgctcgcgggagccatatacgccggtgcagtcgaggactacatcaacgccaagttcacgccaggggagcgattgcagtgaacgttcatgcaatacgcggatggcgtcatcaccaacaaaaagttgatcgcgttcctgtcgtacttcccatgcaaaacggccatggctggtgtcatatttcaacaaatgcgccatgcccgcagcatccgccagttcgttgattgccaccacggtaatttccgcccggcgtccggattcatacaaagcacgaaccacattacgcccgatgcgaccgaagccatttatcgctacgcgtacggtcatagatctcctgcaaggttttccctgagcaaatttgccagacagagtaatccagcaaatcgtccggggaaaccttacctgtcgcaaactgcgactgattggttaattgtcgaacatttaatcgactgaaacgcttcagctaggataagcgaaacgtggaataaaaggaatgtttgtccagccgaagaagacatttatctgactcacatcacacttttatccccttttgtgggaagctttattccaggctggcgtaataataaccctacaataactggaataaattgtcagcttgtgaagtgataccggccttcttcagtcatctctactatcagattggcctgacggctattcatcagcacacgctcgacattggggccatcggtgcgggcataaaatgcttcggctacttgccgcgttaatcctcccgcaattttacgactaatcaagcgctcccgcagaatttgagcaggtgcatgaataaaaatagaaaaatcgcagaaagatgccaactccagccacttttcatcatccagtaacaaccagtttccttcgacgatgacgagtggtgcggtaacgtgcaacgcatcttcaacaggatcatgcttttgtcgatcgtactgcggccacgtacaatccccttccacgacctggcgcagattttccgtcagtttcgcaacgtcaaatgtctctggtgcgcctttgaaggggcgcaattgatgcgcatccagccagctattgtaatggtgaaaaccatccatcgggagcgtctgaatagcgggcagttccgggtcttgttgcgcgagatattcccagaaggtggttagggttgatttacccgtccccggcggagcgcaaagaaaaaccaccgtacgccgctgcggatttaccgtctgtaaggccgccaacatgtgcagcaacggtttatgtacattttcaatctcttcgttctggtactgtgcctgtatcttcagcccattcaccgttaattcaattttcacggcgttaattcctttaaggtggtcgttactgccagcgtcagcgccgttttgaccattccgctaaaacgcgcctctgaccagacggagaaatcagcgaacttcatcgcttttaacgcgtcatagagcatcgcattgcgggttatgctattgacgttgctgataaaatcccaggtcatgtcatcggcaaatccgggcgtttcatcctgttcgttcaggtaatgccagaactgggaaaaatgcgtgatatcggcgtacaaccatttatccattttccccaacgcataaatcaaacgcagtgcaacatcaatatcgtcaagcgggccgctttgggcgagtaacggcttcactgcatattccacgatctcttcatcgttatcgacaaacagcgacggcagaaactggcgtatcccctggagcaaaatggtatgcgcagttttcataaatgaaaataaattgtcctgtgcatccagttgctcaagcacatcatcttctgtcagcgtcgccattggtcttccgatagatcaccatcaatgcagggagtctattatattacacgtttggtccgcgccgccgatcagtaatgtctgcgtccgcaccccattcgccgtctgttggataccgttcaccagctcaccgcccgtcacgcccgtagcgctaaagaggatatcgttccccctcaccagttcatcgagcgagtacacacggttaacgtcaacgcccattgccttgcaacgcttgcgctcctgctctgcaatctgccgattttccgtgtaatcccctttagcctggcaaaagtcaatcagctcggcctgcatatccccgcctaatgctttaacggcacaggcagaaatcacgccttctggcgcaccgccgatggtgtacatcacatcgtaaggattatcctgccagcaggtcagcacgctggcggcgacatcgccatccggcagggcaaaaaccttcacgcccagctgtgttgcttcctcaatcgcggcactcaggcgcggtttatccagcgtaaccatgcgcagcttatccagcggtttgcctaacgctttcgccacgttgcgcaggttgtccgtcagaggcaaagacagatcaatcgcgcccgccgccagccgattaacaaccagctttttcatatacatatcgggcgcatgtaacaggctatctcgaggggcgaaagccatgaccgccagcgcattgctctgccccatcgccaccatccgcgtgccttcaatgggatcaaccgcgatatcgacttctggcccatcgcctttgcccacctcttcgccaatccacagcatcggcgcatggtcaatttctccttcgccgataaccactcgtccacgaaaagcgacgtcgtttaatgcctggcgcatcgcggtgaccgccaggccatcaattttatttttgtcgccacatccggtttgcggccaggcagccaacgctgcctgttccgtaacgcgaaataatggccacgccagggacatcattgcgcggcctccccgatatcaacgccaaattgtgccagcagatatttctcggcctgttcattccagatgccgtgcgtttcctcaaccagccgcgccaactctttaaacagcggatcggttttgcctttttcggcaaaatcggcaatggcagtgagcggcatggtcacgccgttataaatgagttttttaccgccagggatatccggcagattgagcacggtttctggcaccgcatccaggccaccgatatgggtcaccataaacgacggctgtaactgcccagtggcgctaagggcaatcgcctctttcatgtcgtccgttgaaccgccagatgtaccgacgacgtgcgtgctgttgtaatggacgttgtagaaattaaacggcactttgaagtttttatccgtcggcccggcaaagaagttcagacagccatcttccgccagtaattcatcagccatctcaacgacagcaggcaccgccgcataaacaaaaatgtcatcgaacccggcatctcctgtcagcgcccgcagcatctggacaggatcgctcatccctttggtattcacatacaccagctcaatgcctttactggccgccagttccaccggcagcagcttctgtacctgcgccagacgtttgtcgtcgatatcgaccaccaccacccgcgacggttgtatgccgccgttaatggcgtaatcgatagcgccaatgcccatcggacctgcacacgccagcagtgcaatattgccgccaggtttgacgcccatgcgatgctcataaacatattgcgtggtgtgataattggcatgataagcaccaataatgcagcacataggctctgccagcgacgccgcagcaaaataagagccgtgatacggtaatacgcagcccaaattaatggcgatttcgggaataatcatataagtggcattgccgccaaaatattcgtagctgtagcccgctgaatatccgcttggtaaccccatcgccggttgcaatacaaaacgctggcctttttatatttgccagtgagatttttacccacttcgacaataaccccggcacattcatgcccggtaatgaccggatgattttctaaatcgtcgggtacgcgtttatgttcactaccgagtaacgccgctttccaggtcgataaacagacgctgtcagaaattacactcaccagtaattcattatcggtaatttctggcagttcaaatacgcgcagacggacatcccgcttgccataaatagcagcaactttggttttcatttttacctctgtaatcagtgtttatgttcggcggttaattgattaaataaagtgtcgagttttggatcgccaatatagttattaatcaatatcagtggtttatccgtcacacgtttcacgcgcccttccagactggcatgagtaacgacgatatccgcatccgcaggcacgttttctatggcgtaatgttttacttcaattgccagccccgctttttccaggcgtttacggaaggtggtcgcgcccatcgcactggagcccatccccgcatcgcaaacaaaggcgatacgcttaaccctgcttaacgagaatgcaccctcttgtttcatcgccttaaccgcattggctgactgagcaaactcatcttcgctctccgtttccaccgttttttccatcttcagtatcagcgaagtaatagcaaaggacaccagggtacctaccgtaacaccggcaattgtcgccaggaacgagcctttcggcgtcagtgccaggtaagcaaagatagaccccggacttgggccagccaccagaccaccgtccagtaagttaaacatccaggtgccagacataccgcccgcaatcatggcaataatggtcagcggcttcatcagcacatacgggaaatacagttcgtggatcccaccgaggaagtgaataatcatcgccccgggcgcagaacgtttactcatccctttaccaaacaaggtaaacgccagcagcagccccaggcccggacctgggttagaggccaccataaagaagatggatttaccgttaaccgaagcctgttgcattcccagcggataatagacgccctgatcgatcgcattattgaggaaaagcactttcgccggttcattgatgactgacaacaatggcagataacccgcatgtaccagcgcctcaatacactctttgacgaaagtattggcaattaacaccgccgggccgataacttcaaaacccagcagacaaaggagcatccccgcgatacctaatgagaagttattgataaccatctcaaaaccggcaggtatgcgtttttccagtgccttatcgacatattttatgaccaacccaccgagcggccccatgatcattgagccaaggaacatcgggatctctgcgccaacgatcacaccaatagtacctattccgcccatgaccgccccgcgtttaccgccgaccagatgaccacctgtagaaccaatcatcacgggcaataaataggtaatcatcgggccgacaattttggcgaaatgttcgttaggcagccaaccggtgggaataaataacgcagtaataaaaccccaggcaataaaagcaccaatattggggatgaccattgcagtcaaaaagcccccaaaagcctggacctttgcacgagcagacttgttttccataatattatcctgtagaggagagagtaattatccgcggctgataatgtccgctaattgtttttctgatgatgctgttaagagttgttcgagtatttcttcttcgcacagtaattcacttaacgcctgaatagcgccaatgtgcgaatcggcatcggcagcagagagtccgatgagtaatttaattggttcgtcattccccggaaaataaacaccttgttcaagtaatgtcaaagacatcccggttttaagcgccccacattccggtcgcgcatgaggcattgccacgcctggtgcgagaatataataagggccattgttaatggtggaatctttaattgcctgaatgtaattctcgctgatatagtttttatccagcaatgataccatcgagaaatcgatagcttcctgccaatcttttgctgaatgtataactgagattgatgattctggaaaataatcactaagccgcataaattatccttattttatttttagggtaccgtccggcggtaaaaataaaatactcgtgcggtttaatgaaagcaattgagcagggaaaccggtgttttgaaaacagtgaattattaatttcttatataacattgagttatagatataacaacaaatgtcaataccgcatatcgtgatgcatattacataattgatatttattgcatataaatatttgtgatctacaacacgccttatctattgcttgtccgcaaacggacatatcaaggtaataaaaaaggtcgccgaagcacctttttacccgaaatgctaattacagcagttcttttgctttcgcaacaacgttatcaacagtgaagccgaactcttcaaacagcagctctgccggagcagattcaccgaaggtggtcataccgacgatagcaccgttcaggccaacatacttgtaccagtagtcagcaatacccgcttctacagcaacgcgtgcagtaaccgctttcggcagtacggattcacggtaagcagcatcctgcttgtcaaatgcgtcggtagacgacatggacaccacgcgcgctttcacgccttcggcagtcagtttttcgtaggcagcaacagccagttcaacttctgaaccggtagcgatgaaaatcagttccggctgaccggcgcagtctttcagcacataaccaccgcgcgcgatgtttgccagttgctcttcagttcgttcctgctgcgccaggttctgacgggagaggatcagtgcggtcgggccgtcctgacgctcaacaccgtatttccacgcgaccgcggattcaacctggtcacacggacgccatgtagacatgttcggggttacgcgcagagaagcgacctgctcaaccggctggtgagtcggcccgtcttcgcccagaccgatggagtcgtgggtgtaaaccatcacctgacgctgtttcatcagcgcagccatacgtacggcgttacgtgcgtattccacgaacatcaggaaggtggaggtgtacggcaggaagccaccgtgcagggagataccgttagcaatcgcggtcataccgaactcgcgaacaccgtagtggatgtagttacccgcagcatcttcgttgattgctttagaaccagaccacagggtcaggttagacggcgccaggtcagcagaaccgccgaggaattccggcaacagcggaccgaacgcttcgatagcattctgagacgctttacggctggcgattttcgccggattagcctgcagtttagcgatgaactctttcgctttagcgtcgaagtcagacggcatttcgcctttcatacggcgggtaaattcagcggcttcctgcggataagctttcgcgtaagcagcgaatttctcgttccatgcggattctttcgcctggcctgcttctttcgcatcccactgagcatagatttcagacgggatttcgaacggcgcatatttccagcccagttgttcgcgggtcagggcaatttcagcgtcgcccagcggcgcaccgtgggagtcgtgggtaccggctttgttcggggaaccgaaaccgatgatggttttgcacatcagcagggaaggtttgtcagtcactgcgcgcgcttcttctactgcgcgtttgatagatgccgcgtcatgaccgtcgatgtcgcgaataacgtgccagccgtaagcttcgaaacgcattgcggtgtcgtcggtgaaccagccttcaacgtgaccatcgatagaaataccgttgtcatcgtagaatgcaatcagtttacccagcttcagcgtacccgccagagagcaaacttcgtgggagatgccttccatcatgcagccgtcgcccatgaaggcgtaggtgtagtggtcgacaatgtcgtggcccggacggttaaactgcgccgccagcgttttttctgcaatcgccataccgactgcgttggcaataccctgacccagcggaccggtggtggtttccacacccagcggtgtaaccccactttccgggtgacccggagttttagagtgcagctgacggaagtttttcagttcttccatcggcagatcgtaaccggtgaggtgcagcaggctgtagatcagcatggagccgtggccgttggacagcacgaagcggtcacggtcagcccaggacggattctgcgggttgtgtttcaggaaatcacgccacaggacttcggcaatgtcagccatacccataggggcccccgggtgaccggatttggctttctgtactgcgtccatgctcagcgcacgaatagcattggcaagctctttacgtgaggacattttgactccagatcggatgatgaagggcacgcccttaacgacttgacgacagcgcgttttgggctacgccgggaaaaatttgccaacaatttaccgcaagccgcgcgtcatgtacatggaacatccttttgccgcttcagaaatctctggatcatgctcgcatgttgcgcaatctactcgcccgtccgctgcgcttttccttatactgagactgagcgtcgattcacctgcaaacggcgcatttttagaataatcctgaccttgtgcggaagagaaaacatgaaaattcgcgccttattggtagcaatgagcgtggcaacggtactgactggttgccagaatatggactccaacggactgctctcatcaggagcggaagcttttcaggcttacagtttgagtgatgcgcaggtgaaaaccctgagcgatcaggcatgtcaggagatggacagcaaggcgacgattgcgccagccaatagcgaatacgctaaacgtctgacaactattgccaatgcgctaggcaacaatatcaacggtcagccggtaaattacaaagtgtatatggcgaaggatgtgaacgcctttgcaatggctaacggctgtatccgcgtctatagcgggctgatggatatgatgacggataacgaagtcgaagcggtgatcggtcacgaaatggggcacgtggcgttaggccatgtgaaaaaaggaatgcaggtggcacttggtacaaatgccgtgcgagtagctgcggcctctgcgggcgggattgtcggaagtttatctcaatcacaacttggtaatctgggcgagaaattagtcaattcgcaattctcccagcgccaggaagcagaagccgatgattattcttacgatcttctgcgccaacgcggcatcagcccggcaggtcttgccaccagctttgaaaaactggcaaaactggaagaaggtcgccaaagctcaatgtttgacgaccatcctgcatccgccgaacgcgcccagcatattcgcgatcgcatgagcgcggatgggattaagtaaagcctggtggtgtcgaacgtaggtcagataaggcgttcacgccgcatctgacatgaatggcacatttgttaccttgtgcgcattgccggatgcgatgctggcgcatcttatccggcctacgggtgccgaacgtaggtcggataaggcgttcacgccgcatccgacattaatggcacgttttacccgtgcgcatcgcatctggtgcttactcgccctttttcgccgcctgaatatacagcatttccagcgccagcgttgccgctgccagagcagtgatttccgactgatcgtatgccggagccacttccactacgtccatcccaacaatgttgagatctttcaggccgcgtaccagtttaatagcgcgatcggaggtcaggccgccaatcactggcgtaccggtgcctggtgcaaaagcaggatccaggcagtcgatatcaaaagtcaggtaaaccggcatatcacccacaatctgtttcacttgggcgataacgtcatccacgctgcgatcgttcacctggcaggcgtccagcacggtaaagccgttgtctttatcaaactcggtacgaataccaatctgcacggaatgattcgggtcgatcagaccttctttcggcgcggtatagaacatagtgccgtggtcaaattcacaaccgttcgcataggtatcggtgtgggcgtcaaagtgtaccagcgccattttgccgaaatgcttcgcatgagcacgcagcagcggcagcgtaacaaagtggtcaccaccgaaagagagcatacgcttaccggcagccagcagcttctcggcgtgcgcctgcagcttttcgctcatctcacgggcatcgccaaaggcatataccagatcgccgcagtccacgacgttcagacgctcacgcatgtcgaaattccacgggaagcggttgtgttcccaggccagattcgtcgaaacctgacggatcgctgccggaccgtggcgaccacccgcacgaccagaagtggccatatcgaacggcacgccagtaatcacccagtctgcatcgctgtcatacggctggaagttcatcggcaggcgtaaaaaaccaaaggcattggaaaccagtgagttatcgtattgatgacctaaggtgctcatggatggactcctattacaaagtcgatataaaaaaacccttccgcgtcgttaggcccgacgaggaagggttggatttgtcacaataaattgtggcggattatcaccgctaaattaagcggattcaagtaacacaggacttactcatcttcaagataagtataaccgtacaaacctgcctcgaactcttcaaggaactgttgttgcagttcagcatcaagatcggttttcttcacttgatcgcggaactgggttaacagcgttttcggatcgagctgtacatattgcagcatgtccgccacggtatcgccttcgtcagacagttctacttctacgctaccgtcagggaagacgaacacgtcaaccgcttcggtatcaccgaacaggttgtgcatgttgccgaggatctcctgatatgcgccgaccataaagaaaccgagcatcggcggattctctggatcgtactccggcattggcattgtcgtggcaataccgtcaccatcaatatagtggtcgatagcaccgtcagagtcacaggtaatatccagcagcacagcgcgacgttccggcacttgatccagcccttccagcggcagaaccgggaacaactggtcgatcccccatgcgtccggcatcgactggaacagcgagaagttgacgtacattttgtccgccatacgttcctgcagctcgtcgataatcggacgatgagcacggttttgcggatccagctgcttttgcacttcatggcacatgctcaaataaagctgctcagcccatgcacgttcttgcaggctaaagatgccggaagagtagccgatatgaatgtcgtgcagatccatctgactgtcgtgtaaccattcacgcagagaacggcgagttcccggttcgtgcatctcctgccaggtttcccacatgctttgcagcgcgcgcggcgcatcttctgcaggcgcggtcggcaccgtgtattcgttacgttccacgccgatgatattagacaccagcacggtgtgatgcgcagtcaccgcacgacccgattcggtgattaccgtcggatgcggcagaccgttttcttcacacgcatcgccaatcgcccagataatgttgttggcgtattcattgaggccgtagttcaccgaacagtcggactgcgaacgagtaccttcataatccacgcccagaccgccgccgacgtcgaagcactgaatattgacgcccagcttgtgcagttccacatagaaacgcgcggattcacgaacgcctgtcgcgatatcgcgaatattcgccatctgcgaaccgaggtggaagtgcagtagttgcaggctgtcgagacgcccggcttcacgcagggtttcaaccagttgcagtacctgagtcgcagccaggccgaacttcgatttttccccgccggaggactgccatttacccgaaccctgcgaagccagacgtgcacgcacgcccagacgaggaacgacattcagacgttctgcttcatccagcacaatggcgatttctgacatcttctcaatgaccagatagaccttgtgccccatcttctcgccaattaatgccaggcggatatattcgcggtctttataaccgttgcagacgatgacgctacgggtcatgccagcatgtgccagtactgccatcaactcggctttggaaccggcttccagacccagcggttcgcccgaatgaatcagggactcaatcacgcggcggtgctggttaactttgatcggataaacaaggaagtaatcgccgttatagccgtaggattccctcgcacgtttgaacgcggcgttaatggaacgcaaacggtgctgcaggatctgtgggaaacagaacagtgcaggcagacgctggccctgtgcttcacgagttttcactaactgcgcgagatcgacgcgagcttccgggacgtccgggtccgggcacacgctaatgtggcccagctcgttaacgtcatagtagttattgccccaccaggcaatattgtaagtacgcagcatcttgctggcttcctgggagctcattgcaacctcctgcatggagcgtagtacaccgtgttcgcccgctgacgaaggcaaacccatagacatgtcgtcagacatagcgaacctcaaattattttattaagtgtaaaacagttaacgactatcgcagcctggaactgcgataacaacccataagcacatggattttccagcagtgaatgctgacgctccaactgcgcaaccggtttctttttcataacattattaagcacataaccgaacgtaagtgtgaaagttcggcgaaaccacgagaaaactcttgtttttacaagagcgcccttgttcagtcctcagtaactgtaaccagctcttgaatcctgagaagcgccgagatgggtataacatcggcaggtatgcaaagcagagatgcagagtgcggggaacgaatcttcaccagaacggtgagacaggttaagcagcagacaacggttcattatttcgtatcacctccacggccgcctgttaagacgaacccacaagccaaaactctgatttcaacccggctggaagtggcaacacgaaagaaacgtcgtgtgctttttatttaagccgcgcgccgcgttttataccccacaatggcagaaaattgcaaaagataaatacgcagaatgccggcattgtcaggaaaaatttccagccacgtttttaacagaatgagacacgattcaaaaaaaagtggaaatagggtgaagaattgacctaaaatagccatccagatgttaatccatccataccgattaacactcagactgccagtgtttttaacctgcagagtcgtggtaggatccgctaccacagaaaatccacacaacagtttgagctaaccaaattctctttaggtgatattaaatatggcaaaacacctttttacgtccgagtccgtctctgaagggcatcctgacaaaattgctgaccaaatttctgatgccgttttagacgcgatcctcgaacaggatccgaaagcacgcgttgcttgcgaaacctacgtaaaaaccggcatggttttagttggcggcgaaatcaccaccagcgcctgggtagacatcgaagagatcacccgtaacaccgttcgcgaaattggctatgtgcattccgacatgggctttgacgctaactcctgtgcggttctgagcgctatcggcaaacagtctcctgacatcaaccagggcgttgaccgtgccgatccgctggaacagggcgcgggtgaccagggtctgatgtttggctacgcaactaatgaaaccgacgtgctgatgccagcacctatcacctatgcacaccgtctggtacagcgtcaggctgaagtgcgtaaaaacggcactctgccgtggctgcgcccggacgcgaaaagccaggtgacttttcagtatgacgacggcaaaatcgttggtatcgatgctgtcgtgctttccactcagcactctgaagagatcgaccagaaatcgctgcaagaagcggtaatggaagagatcatcaagccaattctgcccgctgaatggctgacttctgccaccaaattcttcatcaacccgaccggtcgtttcgttatcggtggcccaatgggtgactgcggtctgactggtcgtaaaattatcgttgatacctacggcggcatggcgcgtcacggtggcggtgcattctctggtaaagatccatcaaaagtggaccgttccgcagcctacgcagcacgttatgtcgcgaaaaacatcgttgctgctggcctggccgatcgttgtgaaattcaggtttcctacgcaatcggcgtggctgaaccgacctccatcatggtagaaactttcggtactgagaaagtgccttctgaacaactgaccctgctggtacgtgagttcttcgacctgcgcccatacggtctgattcagatgctggatctgctgcacccgatctacaaagaaaccgcagcatacggtcactttggtcgtgaacatttcccgtgggaaaaaaccgacaaagcgcagctgctgcgcgatgctgccggtctgaagtaatctttcttcacctgcgttcaaaggccagcctcgcgctggcctttttcttttggataggcgttcacgccgcatccggcaaaaaaaccgcccgcacaataacatcattcttcctgatcacgtttcaccgcagattatcatcacaactgaaaccgattacaccaaccacaacagacaaagatttgtaatattttcatattattattcggttttcacagttgttacatttcttttcagtaaagtcttaattgcagataacagcgtttaatctatgatgatataactcaattattttcatgcacttaaatcataactaagataaatgttagtgtaagcgattacactgatgtgatttgcttcacatctttttacgtcgtactcacctatctaattcacaataaaaaataaccatattggagggcatcatgcctgacgctaaaaaacaggggcggtcaaacaaggcaatgacgtttttcgtctgcttccttgccgctctggcgggattactctttggcctggatatcggtgtaattgctggcgcactgccgtttattgcagatgaattccagattacttcgcacacgcaagaatgggtcgtaagctccatgatgttcggtgcggcagtcggtgcggtgggcagcggctggctctcctttaaactcgggcgcaaaaagagcctgatgatcggcgcaattttgtttgttgccggttcgctgttctctgcggctgcgccaaacgttgaagtactgattctttcccgcgttctactggggctggcggtgggtgtggcctcttataccgcaccgctgtacctctctgaaattgcgccggaaaaaattcgtggcagtatgatctcgatgtatcagttgatgatcactatcgggatcctcggtgcttatctttctgataccgccttcagctacaccggtgcatggcgctggatgctgggtgtgattatcatcccggcaattttgctgctgattggtgtcttcttcctgccagacagcccacgttggtttgccgccaaacgccgttttgttgatgccgaacgcgtgctgctacgcctgcgtgacaccagcgcggaagcgaaacgcgaactggatgaaatccgtgaaagtttgcaggttaaacagagtggctgggcgctgtttaaagagaacagcaacttccgccgcgcggtgttccttggcgtactgttgcaggtaatgcagcaattcaccgggatgaacgtcatcatgtattacgcgccgaaaatcttcgaactggcgggttataccaacactaccgagcaaatgtgggggaccgtgattgtcggcctgaccaacgtacttgccacctttatcgcaatcggccttgttgaccgctggggacgtaaaccaacgctaacgctgggcttcctggtgatggctgctggcatgggcgtactcggtacaatgatgcatatcggtattcactctccgtcggcgcagtatttcgccatcgccatgctgctgatgtttattgtcggttttgccatgagtgccggtccgctgatttgggtactgtgctccgaaattcagccgctgaaaggccgcgattttggcatcacctgctccactgccaccaactggattgccaacatgatcgttggcgcaacgttcctgaccatgctcaacacgctgggtaacgccaacaccttctgggtgtatgcggctctgaacgtactgtttatcctgctgacattgtggctggtaccggaaaccaaacacgtttcgctggaacatattgaacgtaatctgatgaaaggtcgtaaactgcgcgaaataggcgctcacgattaatctccccaagcttcctcccatcgcggaggaagccacctcttgcagtcatcttttcttcgctctatcctctgccgctatgaaaacatcccgtctccctatcgccatccaacaggccgttatgcgtcgcctgcgggaaaaactcgcccaggccaacctgaagctagggcgtaactacccggagccaaaactctcttacacccagcgcggaacctccgccggaacggcctggctggaaagctatgaaattcgcctcaatcccgttttgctgttggaaaacagtgaagcttttattgaagaagtggtaccgcacgaactggcacatttgctggtatggaaacatttcggccgcgtagcgccacatggcaaagagtggaagtggatgatggaaaacgtgctgggtgttcccgcccgtcgtacgcatcagttcgaactgcaatccgtgcgtcgcaacaccttcccctaccgctgcaagtgccaggagcatcagcttaccgtacgccgccataatcgcgtagttcgtggcgaggccgtctatcgctgtgttcactgcggtgaacagctggttgcgaaataaccatctgaactatcaggaactttcctgatctggctgattgcataccaaaacagctttcgctacgttgctggctcgttttaacacggagtaagtgatgtaccgttatttgtctattgctgcggtggtactgagcgcagcattttccggcccggcgttggccgaaggtatcaatagtttttctcaggcgaaagccgcggcggtaaaagtccacgctgacgcgcccggtacgttttattgcggatgtaaaattaactggcagggcaaaaaaggcgttgttgatctgcaatcgtgcggctatcaggtgcgcaaaaatgaaaaccgcgccagccgcgtagagtgggaacatgtcgttcccgcctggcagttcggtcaccagcgccagtgctggcaggacggtggacgtaaaaactgcgctaaagatccggtctatcgcaagatggaaagcgatatgcataacctgcagccgtcagtcggtgaggtgaatggcgatcgcggcaactttatgtacagccagtggaatggcggtgaaggccagtacggtcaatgcgccatgaaggtcgatttcaaagaaaaagctgccgaaccaccagcgcgtgcacgcggtgccattgcgcgcacctacttctatatgcgcgaccaatacaacctgacactctctcgccagcaaacgcagctgttcaacgcatggaacaagatgtatccggttaccgactgggagtgcgagcgcgatgaacgcatcgcgaaggtgcagggcaatcataacccgtatgtgcaacgcgcttgccaggcgcgaaagagctaacctacactagcgggattctttttgttaacccctaccccacgcgtacaaccgcgtggggagacgacgcggatttttaactatgcgtatcccccgcatttatcatcctgaaccactgaccagccattctcacatcgcgctttgcgaagatgccgccaaccatatcgggcgcgtactgcgcatggggccggggcaggcgttgcaattgtttgacggtagcaaccaggtctttgacgccgaaattaccagcgccagcaaaaaaagcgtggaagtgaaggtgctggaaggccagatcgacgatcgcgaatctccgctgcatattcacctcggtcaggtgatgtcgcgtggtgaaaaaatggaatttactatccagaaatcgatcgaactcggtgtaagcctcattacgccacttttttctgagcgctgcggcgttaaactggatagtgaacgtctgaacaagaagcttcagcagtggcagaagattgcaattgctgcctgtgagcagtgtggtcgtaaccgggtgccggaaatccgtccagcgatggatctggaagcctggtgtgcagagcaggatgaaggactgaaactgaatcttcacccgcgcgccagtaacagcatcaatacgttgccgttaccggttgaacgcgtccgcctgctgattggcccggaaggcggtttatcggcagatgaaattgccatgactgcccgctatcaatttactgatatcctgttgggacctcgcgttttgcgtacagagacaactgcgctcaccgccattaccgcgctacaagtacgatttggcgatttgggctaacggagaagaataatgatcaagctcggcatcgtgatggaccccatcgcaaacatcaacatcaagaaagattccagttttgctatgttgctggaagcacagcgtcgtggttacgaacttcactatatggagatgggcgatctgtatctgatcaatggtgaagcccgcgcccatacccgcacgctgaacgtgaagcagaactacgaagagtggttttcgttcgtcggtgaacaggatctgccgctggccgatctcgatgtgatcctgatgcgtaaagacccgccgtttgataccgagtttatctacgcgacctatattctggaacgtgccgaagagaaagggacgctgatcgttaacaagccgcagagcctgcgcgactgtaacgagaaactgtttaccgcctggttctctgacttaacgccagaaacgctggttacgcgcaataaagcgcagctaaaagcgttctgggagaaacacagcgacatcattcttaagccgctggacggtatgggcggcgcgtcgattttccgcgtgaaagaaggcgatccaaacctcggcgtgattgccgaaaccctgactgagcatggcactcgctactgcatggcgcaaaattacctgccagccattaaagatggcgacaaacgcgtgctggtggtggatggcgagccggtaccgtactgcctggcgcgtattccgcaggggggcgaaacccgtggcaatctggctgccggtggtcgcggtgaacctcgtccgctgacggaaagtgactggaaaatcgcccgtcagatcgggccgacgctgaaagaaaaagggctgatttttgttggtctggatatcatcggcgaccgtctgactgaaattaacgtcaccagcccaacctgtattcgtgagattgaagcagagtttccggtgtcgatcaccggaatgttaatggatgccatcgaagcacgtttacagcagcagtaacccaccttagcgagaaggatctcgttgagactctgagtgacagcgcccttctttccacgcatactgggcgctgttgcttttttgaaccaggaaacagaacctctgacaatgaatttacagcatcactttcttattgccatgcctgctctccaggatccgattttccgtcgttccgtggtctacatttgcgaacataataccaatggtgcaatggggatcatcgtcaacaagccgctggaaaatctcaaaattgaagggattctggaaaagctgaagatcacgccggagccgcgtgatgaatcaatccgtctggataaaccggttatgctcggcggtccgctggctgaagatcgcgggtttattttgcatactccgccctccaattttgcttccagcattcgcatttcagacaacacggtaatgaccacttcccgcgatgtgctggaaacgctcggcaccgataaacaaccgtctgacgtattggtggctctgggttatgcctcctgggagaaaggtcaactggaacaagaaattctcgataacgcgtggctaacggccccggcagatctgaatattctgttcaaaacgccgattgccgaccgctggcgcgaggcggcaaaactgattggtgtggatattctcaccatgcctggtgtggcaggacacgcctgatgagtggaaccttactcgccttcgacttcggcaccaaaagcattggcgtagcggtcggccaacgcattaccggcaccgctcgccctttgcctgcaattaaagcacaggacggtacgccggactggaacattatcgagcgtttactgaaagagtggcagccggacgaaatcatcgtcggtttgccgctgaatatggacggcaccgagcaaccattgactgccagagcgcgtaaatttgccaaccgtattcatggccgtttcggtgttgaagtaaagctccatgacgagcgtcttagcactgtggaagcccgttccggtctgtttgaacagggcggctatcgggcgctcaacaaaggcaaagttgactctgcctctgcggttattattctcgaaagctatttcgagcagggatattaaggcgatttaaacgcctggcggagtgtaaataatatcatcgcgtcttattgccggatgcggcgtgaacaccttatccagcacacatctggcagcggctataggtctgataagacgcgttagcgtcgcatcagacatttattgcctttgtaggcccgataagcttgcgcatcgggcatggcaacgtcacaaacgcccttcccccacccggtgctgataactctgctgaaacgttatcatccccacctgctgcccggtttgaataacatgcggtaactggtgggttttcccttcgcgaatcaaattccccaccgcgggtgtgttaatcagcaattcaaatagcgccacgcgtccttcctgtttatccacttccagcttttgtgacagcactgcccgtaaactacctgccagttgattacgcacggggtctttttcctgcgccggaaatgaatccaccagtcgctcaactgcctgcgcggcaccacgcgtatgtaatgttgccagcaccaaatgcccggtttctgccgccgtcagtgccagacggattgtctcgctgtcacgcagctctccgagcaaaatcacatcaggatcttcccgcaatgcggcccgcaatcccgatgcgaacgtcatacagtgcaaaccaatttcccgctgctggatcaaacatcgctggctggcatagagatattcaacaggatcttccagcgtcagaatatgcgcatcggcatgttgattgagatagccaaccatcgccgccagcgtggtagatttgccactccccgtcgcccccgtcaccagaatcaggccattctcgctcttgagtaattccggcaataccgttggtgcgccaagctgt
